(19) United States
(12) Patent Application Publication
(10) Pub. No.: US 2026/0103519 A1
(43) Pub. Date: Apr. 16, 2026

(54) BISPECIFIC, MODULATABLE ANTIBODY OR ANTIGEN BINDING FRAGMENTS THEREOF

(71) Applicant: iBio, Inc., San Diego, CA (US)

(72) Inventors: Matthew P. Greving, San Diego, CA (US); Alexander Tomoaki Taguchi, San Diego, CA (US); Cody Allen Moore, San Diego, CA (US); Cory Schwartz, San Diego, CA (US); Tam Thi Thanh Phuong, San Diego, CA (US)

(21) Appl. No.: 19/353,886

(22) Filed: Oct. 9, 2025

Related U.S. Application Data
(60) Provisional application No. 63/706,266, filed on Oct. 11, 2024.

(51) Int. Cl. C07K 16/28; C07K 16/30

(52) U.S. Cl. CPC C07K 16/2809; C07K 16/30; C07K 16/3092; C07K 2317/24; C07K 2317/31; C07K 2317/34; C07K 2317/565; C07K 2317/622; C07K 2317/73; C07K 2317/92

(57) ABSTRACT

Provided herein are novel bispecific, modulatable T cell engaging antibody or antigen binding fragments thereof that binds CD3 and an antigen, comprising: a first antibody or antigen binding fragments thereof that binds to the antigen and an Fc region; a second antibody or antigen binding fragments thereof that binds to CD3 and an Fc region; wherein the anti-CD3 binding antigen binding domain is selected to modulate the combined binding on the bispecific antibody or antigen binding fragments thereof to reduce or enhance an activity of the bispecific, modulatable T cell engaging antibody or antigen binding fragments.

### CROSS-REFERENCE TO RELATED APPLICATIONS

[0001] This application claims priority to U.S. Provisional Application Ser. No. 63/706,266, filed Oct. 11, 2024, the entire contents of which are incorporated herein by reference.

### TECHNICAL FIELD OF THE INVENTION

[0002] This document relates to materials and methods for triggering an immune response, and particularly to the use of novel bispecific, modulatable antibody or antigen binding fragments thereof to trigger immune activation or tolerance, and to treat autoimmune diseases, cancer, antimicrobial, antiviral, and other immune responses.

### INCORPORATION-BY-REFERENCE OF MATERIALS FILED ON COMPACT DISC

[0003] The application contains a Sequence Listing which has been submitted electronically in .XML format and is hereby incorporated by reference in its entirety. Said .XML copy, created on Oct. 6, 2025, is named “IBIO-1044.xml” and is 2,335,639 bytes in size. The sequence listing contained in this. XML file is part of the specification and is hereby incorporated by reference herein in its entirety.

### BACKGROUND OF THE INVENTION

[0004] Without limiting the scope of the invention, its background is described in connection with bispecific antibodies.

[0005] Such antibodies are taught by Jishage, et al., in U.S. Pat. No. 11,612,149, entitled, “Non-human Animal Having Human CD3 Gene Substituted for Endogenous CD3 Gene”. These inventors are said to teach genetically modified non-human animals that are deficient in at least one or more types of CD3 genes selected from the group consisting of endogenous CD38, CD38, and CD3γ in its genome and then functionally express at least one or more types of human CD3 genes selected from the group consisting of human CD38, CD38, and CD3γ. The genetically modified non-human animals are said to provide mature T cell differentiation and production, and immunocompetent cells including T cells.

[0006] Additional antibodies are taught by Van Den Brink, et al., in U.S. Pat. No. 11,613,575, entitled. “Humanized Or Chimeric CD3 Antibodies”. These inventors are said to teach humanized or chimeric antibodies binding CD3, bispecific antibodies, compositions, pharmaceutical compositions, use of the antibodies in the treatment of a disease, and method of treatment.

[0007] Finally, other antibodies are taught by Granada, et al., in U.S. Patent Publication No 20230037682, entitled, “BINDING MOLECULES AGAINST CD3 AND USES THEREOF”. These applicants are said to teach binding molecules that specifically bind to CD3, such as monospecific binding molecules that specifically bind to CD3 and multi-specific binding molecules (MBMs) that specifically bind to CD3 and a tumor-associated antigen, conjugates comprising the CD3 binding molecules, and pharmaceutical compositions comprising the CD3 binding molecules and conjugates. They are further said to teach methods of using the CD3 binding molecules, conjugates, and pharmaceutical compositions to activate T cells in a subject, for example a subject having a cancer or autoimmune disease, recombinant host cells engineered, and methods of producing the CD3 binding molecules by culturing the host cells under conditions in which the CD3 binding molecules are expressed.

[0008] Despite these advances, novel antibodies are needed that have unique binding characteristics, target specific epitopes, and can be used for treating cancer or autoimmune diseases.

### SUMMARY OF THE INVENTION

[0009] As embodied and broadly described herein, an aspect of the present disclosure relates to a bispecific, modulatable T cell engaging antibody or antigen binding fragments thereof that binds CD3 and an antigen, comprising: a first antibody or antigen binding fragments thereof that binds to the antigen and an Fc region; a second antibody or antigen binding fragments thereof that binds to CD3 and an Fc region; wherein the first and second antibody or antigen binding fragments are selected to modulate the combined binding on the bispecific antibody or antigen binding fragments thereof to reduce or enhance an activity of the bispecific, modulatable T cell engaging antibody or antigen binding fragments to a pre-determined level. In one aspect, the bispecific antibody comprises an scFV-Fc-ScFv bispecific antibody. In another aspect, the bispecific antibody comprises a tandem scFv-scFv-Fc. In another aspect, the activity is selected from at least one of: T cell killing, CD8 T cell activation, TNF-alpha secretion, IFN-gamma secretion, IL-2 secretion, IL-10 secretion, antigen binding, or CD3 binding. In another aspect, the bispecific, modulatable T cell engaging antibody or antigen binding fragments further comprise a linker between the first and second antibody or antigen binding fragments thereof. In another aspect, the anti-CD3 antibody or binding fragment thereof are selected from:
[0010] a. a heavy chain variable domain (VH) complementarity determining region 1 (CDR1) comprising the amino acid sequence of any one of the following SEQ ID NOS: 1, 11, 21, 31, 41, 51, 61, 71, 81, 91, 101, 111, 121, 131, 141, 151, 161, 171, 181, 191, 201, 211, 221, 231, 241, 251, 261, 271, 281, 291, 301, 311, 321, 331, 341, 351, 361, 371, 381, 391, 401, 411, 421, 431, 441, 451, 461, 471, 481, 491, 501, 511, 521, 531, 541, 551, 561, 571, 581, 591, 601, 611, 621, 631, 641, 651, 661, 671, 681, 691, 701, 711, 721, 731, 741, 751, 761, 771, 781, 791, 801, 811, 821, 831, 841, 851, 861, 871, 881, 891, 901, 911, 921, 931, 941, 951, 961, 971, 981, 991, 1001, 1011, 1021, 1031, 1041, 1051, 1061, 1071, 1081, 1091, 1101, 1111, 1121, 1131, 1141, 1151, 1161, 1171, 1181, 1191, 1201, 1211, 1221, 1231, 1241, 1251, 1261, 1271, 1281, 1291, 1301, 1311, 1321, 1331, 1341, 1351, 1361, 1371, 1381, 1391, 1401, 1411, 1421, 1431, 1441, 1451, 1461, 1471, 1481, 1491, 1501, 1511, 1521, 1531, 1541, 1551, 1561, 1571, 1581, 1591, 1601, 1611, 1621, 1631, 1641, 1651, 1661, 1671, 1681, 1691, 1701, 1711, 1721, 1731, 1741, 1751, 1761, 1771, 1781, 1791, 1801, 1811, 1821, 1831, 1841, 1851, 1861, 1871, 1881, 1891, 1901, 1911, 1916, 1921, 1926, 1931, 1936, 1941, 1946, 1951, 1956, 1961, 1966, 1971, 1976, 1981, 1986, 1991, 1996, 2001, 2006, 2011, 2016, 2021, 2026, 2031, 2036, 2041, 2046, 2051, 2056, 2061, 2066, 2071, 2076, 2081, 2086, 2091, 2096, 2101, 2106, 2111, 2116, 2121, 2126, 2131, 2136, 2141, 2146, 2151, 2156, 2161, 2166, 2171, 2176, 2181, or 2186; and
[0011] b. a VH CDR2 comprising the amino acid sequence of any one of the following SEQ ID NOS: 2, 12, 22, 32, 42, 52, 62, 72, 82, 92, 102, 112, 122, 132, 142, 152, 162, 172, 182, 192, 202, 212, 222, 232, 242, 252, 262, 272, 282, 292, 302, 312, 322, 332, 342, 352, 362, 372, 382, 392, 402, 412, 422, 432, 442, 452, 462, 472, 482, 492, 502, 512, 522, 532, 542, 552, 562, 572, 582, 592, 602, 612, 622, 632, 642, 652, 662, 672, 682, 692, 702, 712, 722, 732, 742, 752, 762, 772, 782, 792, 802, 812, 822, 832, 842, 852, 862, 872, 882, 892, 902, 912, 922, 932, 942, 952, 962, 972, 982, 992, 1002, 1012, 1022, 1032, 1042, 1052, 1062, 1072, 1082, 1092, 1102, 1112, 1122, 1132, 1142, 1152, 1162, 1172, 1182, 1192, 1202, 1212, 1222, 1232, 1242, 1252, 1262, 1272, 1282, 1292, 1302, 1312, 1322, 1332, 1342, 1352, 1362, 1372, 1382, 1392, 1402, 1412, 1422, 1432, 1442, 1452, 1462, 1472, 1482, 1492, 1502, 1512, 1522, 1532, 1542, 1552, 1562, 1572, 1582, 1592, 1602, 1612, 1622, 1632, 1642, 1652, 1662, 1672, 1682, 1692, 1702, 1712, 1722, 1732, 1742, 1752, 1762, 1772, 1782, 1792, 1802, 1812, 1822, 1832, 1842, 1852, 1862, 1872, 1882, 1892, 1902, 1912, 1917, 1922, 1927, 1932, 1937, 1942, 1947, 1952, 1957, 1962, 1967, 1972, 1977, 1982, 1987, 1992, 1997, 2002, 2007, 2012, 2017, 2022, 2027, 2032, 2037, 2042, 2047, 2052, 2057, 2062, 2067, 2072, 2077, 2082, 2087, 2092, 2097, 2102, 2107, 2112, 2117, 2122, 2127, 2132, 2137, 2142, 2147, 2152, 2157, 2162, 2167, 2172, 2177, 2182, or 2187; and
[0012] c. a VH CDR3 comprising the amino acid sequence of any one of the following SEQ ID NOS: 3, 13, 23, 33, 43, 53, 63, 73, 83, 93, 103, 113, 123, 133, 143, 153, 163, 173, 183, 193, 203, 213, 223, 233, 243, 253, 263, 273, 283, 293, 303, 313, 323, 333, 343, 353, 363, 373, 383, 393, 403, 413, 423, 433, 443, 453, 463, 473, 483, 493, 503, 513, 523, 533, 543, 553, 563, 573, 583, 593, 603, 613, 623, 633, 643, 653, 663, 673, 683, 693, 703, 713, 723, 733, 743, 753, 763, 773, 783, 793, 803, 813, 823, 833, 843, 853, 863, 873, 883, 893, 903, 913, 923, 933, 943, 953, 963, 973, 983, 993, 1003, 1013, 1023, 1033, 1043, 1053, 1063, 1073, 1083, 1093, 1103, 1113, 1123, 1133, 1143, 1153, 1163, 1173, 1183, 1193, 1203, 1213, 1223, 1233, 1243, 1253, 1263, 1273, 1283, 1293, 1303, 1313, 1323, 1333, 1343, 1353, 1363, 1373, 1383, 1393, 1403, 1413, 1423, 1433, 1443, 1453, 1463, 1473, 1483, 1493, 1503, 1513, 1523, 1533, 1543, 1553, 1563, 1573, 1583, 1593, 1603, 1613, 1623, 1633, 1643, 1653, 1663, 1673, 1683, 1693, 1703, 1713, 1723, 1733, 1743, 1753, 1763, 1773, 1783, 1793, 1803, 1813, 1823, 1833, 1843, 1853, 1863, 1873, 1883, 1893, 1903, 1913, 1918, 1923, 1928, 1933, 1938, 1943, 1948, 1953, 1958, 1963, 1968, 1973, 1978, 1983, 1988, 1993, 1998, 2003, 2008, 2013, 2018, 2023, 2028, 2033, 2038, 2043, 2048, 2053, 2058, 2063, 2068, 2073, 2078, 2083, 2088, 2093, 2098, 2103, 2108, 2113, 2118, 2123, 2128, 2133, 2138, 2143, 2148, 2153, 2158, 2163, 2168, 2173, 2178, 2183, or 2188; and
[0013] d. a light chain variable domain (VL) CDR1 comprising the amino acid sequence of any one of the following SEQ ID NOS: 6, 16, 26, 36, 46, 56, 66, 76, 86, 96, 106, 116, 126, 136, 146, 156, 166, 176, 186, 196, 206, 216, 226, 236, 246, 256, 266, 276, 286, 296, 306, 316, 326, 336, 346, 356, 366, 376, 386, 396, 406, 416, 426, 436, 446, 456, 466, 476, 486, 496, 506, 516, 526, 536, 546, 556, 566, 576, 586, 596, 606, 616, 626, 636, 646, 656, 666, 676, 686, 696, 706, 716, 726, 736, 746, 756, 766, 776, 786, 796, 806, 816, 826, 836, 846, 856, 866, 876, 886, 896, 906, 916, 926, 936, 946, 956, 966, 976, 986, 996, 1006, 1016, 1026, 1036, 1046, 1056, 1066, 1076, 1086, 1096, 1106, 1116, 1126, 1136, 1146, 1156, 1166, 1176, 1186, 1196, 1206, 1216, 1226, 1236, 1246, 1256, 1266, 1276, 1286, 1296, 1306, 1316, 1326, 1336, 1346, 1356, 1366, 1376, 1386, 1396, 1406, 1416, 1426, 1436, 1446, 1456, 1466, 1476, 1486, 1496, 1506, 1516, 1526, 1536, 1546, 1556, 1566, 1576, 1586, 1596, 1606, 1616, 1626, 1636, 1646, 1656, 1666, 1676, 1686, 1696, 1706, 1716, 1726, 1736, 1746, 1756, 1766, 1776, 1786, 1796, 1806, 1816, 1826, 1836, 1846, 1856, 1866, 1876, 1886, 1896, 1906, 2161, 2166, 2171, 2176, 2181, 2186, 2191, 2196, 2201, 2206, 2211, 2216, 2221, 2226, 2231, 2236, 2241, 2246, 2251, 2256, 2261, 2266, 2271, 2276, 2281, 2286, 2291, 2296, 2301, 2306, 2311, 2316, 2321, 2326, 2331, or 2336; and
[0014] e. a VL CDR2 comprising the amino acid sequence of any one of the following SEQ ID NOS: 7, 17, 27, 37, 47, 57, 67, 77, 87, 97, 107, 117, 127, 137, 147, 157, 167, 177, 187, 197, 207, 217, 227, 237, 247, 257, 267, 277, 287, 297, 307, 317, 327, 337, 347, 357, 367, 377, 387, 397, 407, 417, 427, 437, 447, 457, 467, 477, 487, 497, 507, 517, 527, 537, 547, 557, 567, 577, 587, 597, 607, 617, 627, 637, 647, 657, 667, 677, 687, 697, 707, 717, 727, 737, 747, 757, 767, 777, 787, 797, 807, 817, 827, 837, 847, 857, 867, 877, 887, 897, 907, 917, 927, 937, 947, 957, 967, 977, 987, 997, 1007, 1017, 1027, 1037, 1047, 1057, 1067, 1077, 1087, 1097, 1107, 1117, 1127, 1137, 1147, 1157, 1167, 1177, 1187, 1197, 1207, 1217, 1227, 1237, 1247, 1257, 1267, 1277, 1287, 1297, 1307, 1317, 1327, 1337, 1347, 1357, 1367, 1377, 1387, 1397, 1407, 1417, 1427, 1437, 1447, 1457, 1467, 1477, 1487, 1497, 1507, 1517, 1527, 1537, 1547, 1557, 1567, 1577, 1587, 1597, 1607, 1617, 1627, 1637, 1647, 1657, 1667, 1677, 1687, 1697, 1707, 1717, 1727, 1737, 1747, 1757, 1767, 1777, 1787, 1797, 1807, 1817, 1827, 1837, 1847, 1857, 1867, 1877, 1887, 1897, 1907, 2162, 2167, 2172, 2177, 2182, 2187, 2192, 2197, 2202, 2207, 2212, 2217, 2222, 2227, 2232, 2237, 2242, 2247, 2252, 2257, 2262, 2267, 2272, 2277, 2282, 2287, 2292, 2297, 2302, 2307, 2312, 2317, 2322, 2327, 2332, or 2337; and
[0015] f. a VL CDR3 comprising the amino acid sequence of any one of the following SEQ ID NOS: 8, 18, 28, 38, 48, 58, 68, 78, 88, 98, 108, 118, 128, 138, 148, 158, 168, 178, 188, 198, 208, 218, 228, 238, 248, 258, 268, 278, 288, 298, 308, 318, 328, 338, 348, 358, 368, 378, 388, 398, 408, 418, 428, 438, 448, 458, 468, 478, 488, 498, 508, 518, 528, 538, 548, 558, 568, 578, 588, 598, 608, 618, 628, 638, 648, 658, 668, 678, 688, 698, 708, 718, 728, 738, 748, 758, 768, 778, 788, 798, 808, 818, 828, 838, 848, 858, 868, 878, 888, 898, 908, 918, 928, 938, 948, 958, 968, 978, 988, 998, 1008, 1018, 1028, 1038, 1048, 1058, 1068, 1078, 1088, 1098, 1108, 1118, 1128, 1138, 1148, 1158, 1168, 1178, 1188, 1198, 1208, 1218, 1228, 1238, 1248, 1258, 1268, 1278, 1288, 1298, 1308, 1318, 1328, 1338, 1348, 1358, 1368, 1378, 1388, 1398, 1408, 1418, 1428, 1438, 1448, 1458, 1468, 1478, 1488, 1498, 1508, 1518, 1528, 1538, 1548, 1558, 1568, 1578, 1588, 1598, 1608, 1618, 1628, 1638, 1648, 1658, 1668, 1678, 1688, 1698, 1708, 1718, 1728, 1738, 1748, 1758, 1768, 1778, 1788, 1798, 1808, 1818, 1828, 1838, 1848, 1858, 1868, 1878, 1888, 1898, 1908, 2163, 2168, 2173, 2178, 2183, 2188, 2193, 2198, 2203, 2208, 2213, 2218, 2223, 2228, 2233, 2238, 2243, 2248, 2253, 2258, 2263, 2268, 2273, 2278, 2283, 2288, 2293, 2298, 2303, 2308, 2313, 2318, 2323, 2328, 2333, or 2338.

[0016] In another aspect, the anti-CD3 antibody or binding fragment thereof comprises:
[0017] a. a heavy chain comprising the amino acid sequence of any one of the following SEQ ID NOS: 4, 14, 24, 34, 44, 54, 64, 74, 84, 94, 104, 114, 124, 134, 144, 154, 164, 174, 184, 194, 204, 214, 224, 234, 244, 254, 264, 274, 284, 294, 304, 314, 324, 334, 344, 354, 364, 374, 384, 394, 404, 414, 424, 434, 444, 454, 464, 474, 484, 494, 504, 514, 524, 534, 544, 554, 564, 574, 584, 594, 604, 614, 624, 634, 644, 654, 664, 674, 684, 694, 704, 714, 724, 734, 744, 754, 764, 774, 784, 794, 804, 814, 824, 834, 844, 854, 864, 874, 884, 894, 904, 914, 924, 934, 944, 954, 964, 974, 984, 994, 1004, 1014, 1024, 1034, 1044, 1054, 1064, 1074, 1084, 1094, 1104, 1114, 1124, 1134, 1144, 1154, 1164, 1174, 1184, 1194, 1204, 1214, 1224, 1234, 1244, 1254, 1264, 1274, 1284, 1294, 1304, 1314, 1324, 1334, 1344, 1354, 1364, 1374, 1384, 1394, 1404, 1414, 1424, 1434, 1444, 1454, 1464, 1474, 1484, 1494, 1504, 1514, 1524, 1534, 1544, 1554, 1564, 1574, 1584, 1594, 1604, 1614, 1624, 1634, 1644, 1654, 1664, 1674, 1684, 1694, 1704, 1714, 1724, 1734, 1744, 1754, 1764, 1774, 1784, 1794, 1804, 1814, 1824, 1834, 1844, 1854, 1864, 1874, 1884, 1894, 1904, 1914, 1919, 1924, 1929, 1934, 1939, 1944, 1949, 1954, 1959, 1964, 1969, 1974, 1979, 1984, 1989, 1994, 1999, 2004, 2009, 2014, 2019, 2024, 2029, 2034, 2039, 2044, 2049, 2054, 2059, 2064, 2069, 2074, 2079, 2084, 2089, 2094, 2099, 2104, 2109, 2114, 2119, 2124, 2129, 2134, 2139, 2144, 2149, 2154, 2159, 2164, 2169, 2174, 2179, 2184, or 2189, and
[0018] b. a light chain comprising the amino acid sequence of any one of the following SEQ ID NOS: 9, 19, 29, 39, 49, 59, 69, 79, 89, 99, 109, 119, 129, 139, 149, 159, 169, 179, 189, 199, 209, 219, 229, 239, 249, 259, 269, 279, 289, 299, 309, 319, 329, 339, 349, 359, 369, 379, 389, 399, 409, 419, 429, 439, 449, 459, 469, 479, 489, 499, 509, 519, 529, 539, 549, 559, 569, 579, 589, 599, 609, 619, 629, 639, 649, 659, 669, 679, 689, 699, 709, 719, 729, 739, 749, 759, 769, 779, 789, 799, 809, 819, 829, 839, 849, 859, 869, 879, 889, 899, 909, 919, 929, 939, 949, 959, 969, 979, 989, 999, 1009, 1019, 1029, 1039, 1049, 1059, 1069, 1079, 1089, 1099, 1109, 1119, 1129, 1139, 1149, 1159, 1169, 1179, 1189, 1199, 1209, 1219, 1229, 1239, 1249, 1259, 1269, 1279, 1289, 1299, 1309, 1319, 1329, 1339, 1349, 1359, 1369, 1379, 1389, 1399, 1409, 1419, 1429, 1439, 1449, 1459, 1469, 1479, 1489, 1499, 1509, 1519, 1529, 1539, 1549, 1559, 1569, 1579, 1589, 1599, 1609, 1619, 1629, 1639, 1649, 1659, 1669, 1679, 1689, 1699, 1709, 1719, 1729, 1739, 1749, 1759, 1769, 1779, 1789, 1799, 1809, 1819, 1829, 1839, 1849, 1859, 1869, 1879, 1889, 1899, 1909, 2164, 2169, 2174, 2179, 2184, 2189, 2194, 2199, 2204, 2209, 2214, 2219, 2224, 2229, 2234, 2239, 2244, 2249, 2254, 2259, 2264, 2269, 2274, 2279, 2284, 2289, 2294, 2299, 2304, 2309, 2314, 2319, 2324, 2329, 2334, or 2339; or
[0019] c. an scFV selected from SEQ ID NOS: 2360; 2368; 2376; 2384; 2392; 2400; 2408; 2416; 2424; or 2432.

[0020] In another aspect, the anti-CD3 antibody or binding fragment thereof is encoded by a nucleic acid that comprises:
[0021] a. a VH comprising the nucleic acid sequence of any one of the following SEQ ID NOS: 5, 15, 25, 35, 45, 55, 65, 75, 85, 95, 105, 115, 125, 135, 145, 155, 165, 175, 185, 195, 205, 215, 225, 235, 245, 255, 265, 275, 285, 295, 305, 315, 325, 335, 345, 355, 365, 375, 385, 395, 405, 415, 425, 435, 445, 455, 465, 475, 485, 495, 505, 515, 525, 535, 545, 555, 565, 575, 585, 595, 605, 615, 625, 635, 645, 655, 665, 675, 685, 695, 705, 715, 725, 735, 745, 755, 765, 775, 785, 795, 805, 815, 825, 835, 845, 855, 865, 875, 885, 895, 905, 915, 925, 935, 945, 955, 965, 975, 985, 995, 1005, 1015, 1025, 1035, 1045, 1055, 1065, 1075, 1085, 1095, 1105, 1115, 1125, 1135, 1145, 1155, 1165, 1175, 1185, 1195, 1205, 1215, 1225, 1235, 1245, 1255, 1265, 1275, 1285, 1295, 1305, 1315, 1325, 1335, 1345, 1355, 1365, 1375, 1385, 1395, 1405, 1415, 1425, 1435, 1445, 1455, 1465, 1475, 1485, 1495, 1505, 1515, 1525, 1535, 1545, 1555, 1565, 1575, 1585, 1595, 1605, 1615, 1625, 1635, 1645, 1655, 1665, 1675, 1685, 1695, 1705, 1715, 1725, 1735, 1745, 1755, 1765, 1775, 1785, 1795, 1805, 1815, 1825, 1835, 1845, 1855, 1865, 1875, 1885, 1895, 1905, 1915, 1920, 1925, 1930, 1935, 1940, 1945, 1950, 1955, 1960, 1965, 1970, 1975, 1980, 1985, 1990, 1995, 2000, 2005, 2010, 2015, 2020, 2025, 2030, 2035, 2040, 2045, 2050, 2055, 2060, 2065, 2070, 2075, 2080, 2085, 2090, 2095, 2100, 2105, 2110, 2115, 2120, 2125, 2130, 2135, 2140, 2145, 2150, 2155, 2160, 2165, 2170, 2175, 2180, 2185, or 2190, and
[0022] b. a VL comprising the nucleic acid sequence of any one of the following SEQ ID NOS: 10, 20, 30, 40, 50, 60, 70, 80, 90, 100, 110, 120, 130, 140, 150, 160, 170, 180, 190, 200, 210, 220, 230, 240, 250, 260, 270, 280, 290, 300, 310, 320, 330, 340, 350, 360, 370, 380, 390, 400, 410, 420, 430, 440, 450, 460, 470, 480, 490, 500, 510, 520, 530, 540, 550, 560, 570, 580, 590, 600, 610, 620, 630, 640, 650, 660, 670, 680, 690, 700, 710, 720, 730, 740, 750, 760, 770, 780, 790, 800, 810, 820, 830, 840, 850, 860, 870, 880, 890, 900, 910, 920, 930, 940, 950, 960, 970, 980, 990, 1000, 1010, 1020, 1030, 1040, 1050, 1060, 1070, 1080, 1090, 1100, 1110, 1120, 1130, 1140, 1150, 1160, 1170, 1180, 1190, 1200, 1210, 1220, 1230, 1240, 1250, 1260, 1270, 1280, 1290, 1300, 1310, 1320, 1330, 1340, 1350, 1360, 1370, 1380, 1390, 1400, 1410, 1420, 1430, 1440, 1450, 1460, 1470, 1480, 1490, 1500, 1510, 1520, 1530, 1540, 1550, 1560, 1570, 1580, 1590, 1600, 1610, 1620, 1630, 1640, 1650, 1660, 1670, 1680, 1690, 1700, 1710, 1720, 1730, 1740, 1750, 1760, 1770, 1780, 1790, 1800, 1810, 1820, 1830, 1840, 1850, 1860, 1870, 1880, 1890, 1900, 1910, 2165, 2170, 2175, 2180, 2185, 2190, 2195, 2200, 2205, 2210, 2215, 2220, 2225, 2230, 2235, 2240, 2245, 2250, 2255, 2260, 2265, 2270, 2275, 2280, 2285, 2290, 2295, 2300, 2305, 2310, 2315, 2320, 2325, 2330, 2335, or 2340; or
[0023] c. a nucleic acid encoding a scFV selected from SEQ ID NOS: 2361; 2369; 2377; 2385; 2393; 2401; 2409; 2417; 2425; or 2433.

[0024] In another aspect, the anti-CD3 antibody or binding fragment thereof comprises: a heavy chain variable domain (VH) comprising complementarity determining regions CDR1 to CDR3, comprising the amino acid sequence triplets of SEQ ID NOS; 1, 2, 3; 11, 12, 13; 21, 22, 23; 31, 32, 33; 41, 42, 43; 51, 52, 53; 61, 62, 63; 71, 72, 73; 81, 82, 83; 91, 92, 93; 101, 102, 103; 111, 112, 113; 121, 122, 123; 131, 132, 133; 141, 142, 143; 151, 152, 153; 161, 162, 163; 171, 172, 173; 181, 182, 183; 191, 192, 193; 201, 202, 203; 211, 212, 213; 221, 222, 223; 231, 232, 233; 241, 242, 243; 251, 252, 253; 261, 262, 263; 271, 272, 273; 281, 282, 283; 291, 292, 293; 301, 302, 303; 311, 312, 313; 321, 322, 323; 331, 332, 333; 341, 342, 343; 351, 352, 353; 361, 362, 363; 371, 372, 373; 381, 382, 383; 391, 392, 393; 401, 402, 403; 411, 412, 413; 421, 422, 423; 431, 432, 433; 441, 442, 443; 451, 452, 453; 461, 462, 463; 471, 472, 473; 481, 482, 483; 491, 492, 493; 501, 502, 503; 511, 512, 513; 521, 522, 523; 531, 532, 533; 541, 542, 543; 551, 552, 553; 561, 562, 563; 571, 572, 573; 581, 582, 583; 591, 592, 593; 601, 602, 603; 611, 612, 613; 621, 622, 623; 631, 632, 633; 641, 642, 643; 651, 652, 653; 661, 662, 663; 671, 672, 673; 681, 682, 683; 691, 692, 693; 701, 702, 703; 711, 712, 713; 721, 722, 723; 731, 732, 733; 741, 742, 743; 751, 752, 753; 761, 762, 763; 771, 772, 773; 781, 782, 783; 791, 792, 793; 801, 802, 803; 811, 812, 813; 821, 822, 823; 831, 832, 833; 841, 842, 843; 851, 852, 853; 861, 862, 863; 871, 872, 873; 881, 882, 883; 891, 892, 893; 901, 902, 903; 911, 912, 913; 921, 922, 923; 931, 932, 933; 941, 942, 943; 951, 952, 953; 961, 962, 963; 971, 972, 973; 981, 982, 983; 991, 992, 993; 1001, 1002, 1003; 1011, 1012, 1013; 1021, 1022, 1023; 1031, 1032, 1033; 1041, 1042, 1043; 1051, 1052, 1053; 1061, 1062, 1063; 1071, 1072, 1073; 1081, 1082, 1083; 1091, 1092, 1093; 1101, 1102, 1103; 1111, 1112, 1113; 1121, 1122, 1123; 1131, 1132, 1133; 1141, 1142, 1143; 1151, 1152, 1153; 1161, 1162, 1163; 1171, 1172, 1173; 1181, 1182, 1183; 1191, 1192, 1193; 1201, 1202, 1203; 1211, 1212, 1213; 1221, 1222, 1223; 1231, 1232, 1233; 1241, 1242, 1243; 1251, 1252, 1253; 1261, 1262, 1263; 1271, 1272, 1273; 1281, 1282, 1283; 1291, 1292, 1293; 1301, 1302, 1303; 1311, 1312, 1313; 1321, 1322, 1323; 1331, 1332, 1333; 1341, 1342, 1343; 1351, 1352, 1353; 1361, 1362, 1363; 1371, 1372, 1373; 1381, 1382, 1383; 1391, 1392, 1393; 1401, 1402, 1403; 1411, 1412, 1413; 1421, 1422, 1423; 1431, 1432, 1433; 1441, 1442, 1443; 1451, 1452, 1453; 1461, 1462, 1463; 1471, 1472, 1473; 1481, 1482, 1483; 1491, 1492, 1493; 1501, 1502, 1503; 1511, 1512, 1513; 1521, 1522, 1523; 1531, 1532, 1533; 1541, 1542, 1543; 1551, 1552, 1553; 1561, 1562, 1563; 1571, 1572, 1573; 1581, 1582, 1583; 1591, 1592, 1593; 1601, 1602, 1603; 1611, 1612, 1613; 1621, 1622, 1623; 1631, 1632, 1633; 1641, 1642, 1643; 1651, 1652, 1653; 1661, 1662, 1663; 1671, 1672, 1673; 1681, 1682, 1683; 1691, 1692, 1693; 1701, 1702, 1703; 1711, 1712, 1713; 1721, 1722, 1723; 1731, 1732, 1733; 1741, 1742, 1743; 1751, 1752, 1753; 1761, 1762, 1763; 1771, 1772, 1773; 1781, 1782, 1783; 1791, 1792, 1793; 1801, 1802, 1803; 1811, 1812, 1813; 1821, 1822, 1823; 1831, 1832, 1833; 1841, 1842, 1843; 1851, 1852, 1853; 1861, 1862, 1863; 1871, 1872, 1873; 1881, 1882, 1883; 1891, 1892, 1893; 1901, 1902, 1903; 1911, 1912, 1913; 1921, 1922, 1923; or 1931, 1932, 1933; and a light chain variable domain (VL) comprising complementarity determining regions CDR1 to CDR3, comprising the amino acid sequence triplets; 6, 7, 8; 16, 17, 18; 26, 27, 28; 36, 37, 38; 46, 47, 48; 56, 57, 58; 66, 67, 68; 76, 77, 78; 86, 87, 88; 96, 97, 98; 106, 107, 108; 116, 117, 118; 126, 127, 128; 136, 137, 138; 146, 147, 148; 156, 157, 158; 166, 167, 168; 176, 177, 178; 186, 187, 188; 196, 197, 198; 206, 207, 208; 216, 217, 218; 226, 227, 228; 236, 237, 238; 246, 247, 248; 256, 257, 258; 266, 267, 268; 276, 277, 278; 286, 287, 288; 296, 297, 298; 306, 307, 308; 316, 317, 318; 326, 327, 328; 336, 337, 338; 346, 347, 348; 356, 357, 358; 366, 367, 368; 376, 377, 378; 386, 387, 388; 396, 397, 398; 406, 407, 408; 416, 417, 418; 426, 427, 428; 436, 437, 438; 446, 447, 448; 456, 457, 458; 466, 467, 468; 476, 477, 478; 486, 487, 488; 496, 497, 498; 506, 507, 508; 516, 517, 518; 526, 527, 528; 536, 537, 538; 546, 547, 548; 556, 557, 558; 566, 567, 568; 576, 577, 578; 586, 587, 588; 596, 597, 598; 606, 607, 608; 616, 617, 618; 626, 627, 628; 636, 637, 638; 646, 647, 648; 656, 657, 658; 666, 667, 668; 676, 677, 678; 686, 687, 688; 696, 697, 698; 706, 707, 708; 716, 717, 718; 726, 727, 728; 736, 737, 738; 746, 747, 748; 756, 757, 758; 766, 767, 768; 776, 777, 778; 786, 787, 788; 796, 797, 798; 806, 807, 808; 816, 817, 818; 826, 827, 828; 836, 837, 838; 846, 847, 848; 856, 857, 858; 866, 867, 868; 876, 877, 878; 886, 887, 888; 896, 897, 898; 906, 907, 908; 916, 917, 918; 926, 927, 928; 936, 937, 938; 946, 947, 948; 956, 957, 958; 966, 967, 968; 976, 977, 978; 986, 987, 988; 996, 997, 998; 1006, 1007, 1008; 1016, 1017, 1018; 1026, 1027, 1028; 1036, 1037, 1038; 1046, 1047, 1048; 1056, 1057, 1058; 1066, 1067, 1068; 1076, 1077, 1078; 1086, 1087, 1088; 1096, 1097, 1098; 1106, 1107, 1108; 1116, 1117, 1118; 1126, 1127, 1128; 1136, 1137, 1138; 1146, 1147, 1148; 1156, 1157, 1158; 1166, 1167, 1168; 1176, 1177, 1178; 1186, 1187, 1188; 1196, 1197, 1198; 1206, 1207, 1208; 1216, 1217, 1218; 1226, 1227, 1228; 1236, 1237, 1238; 1246, 1247, 1248; 1256, 1257, 1258; 1266, 1267, 1268; 1276, 1277, 1278; 1286, 1287, 1288; 1296, 1297, 1298; 1306, 1307, 1308; 1316, 1317, 1318; 1326, 1327, 1328; 1336, 1337, 1338; 1346, 1347, 1348; 1356, 1357, 1358; 1366, 1367, 1368; 1376, 1377, 1378; 1386, 1387, 1388; 1396, 1397, 1398; 1406, 1407, 1408; 1416, 1417, 1418; 1426, 1427, 1428; 1436, 1437, 1438; 1446, 1447, 1448; 1456, 1457, 1458; 1466, 1467, 1468; 1476, 1477, 1478; 1486, 1487, 1488; 1496, 1497, 1498; 1506, 1507, 1508; 1516, 1517, 1518; 1526, 1527, 1528; 1536, 1537, 1538; 1546, 1547, 1548; 1556, 1557, 1558; 1566, 1567, 1568; 1576, 1577, 1578; 1586, 1587, 1588; 1596, 1597, 1598; 1606, 1607, 1608; 1616, 1617, 1618; 1626, 1627, 1628; 1636, 1637, 1638; 1646, 1647, 1648; 1656, 1657, 1658; 1666, 1667, 1668; 1676, 1677, 1678; 1686, 1687, 1688; 1696, 1697, 1698; 1706, 1707, 1708; 1716, 1717, 1718; 1726, 1727, 1728; 1736, 1737, 1738; 1746, 1747, 1748; 1756, 1757, 1758; 1766, 1767, 1768; 1776, 1777, 1778; 1786, 1787, 1788; 1796, 1797, 1798; 1806, 1807, 1808; 1816, 1817, 1818; 1826, 1827, 1828; 1836, 1837, 1838; 1846, 1847, 1848; 1856, 1857, 1858; 1866, 1867, 1868; 1876, 1877, 1878; 1886, 1887, 1888; 1896, 1897, 1898; 1906, 1907, 1908; 1916, 1917, 1918; 1926, 1927, 1928; or 1936, 1937, 1938; or CDRs in scFvs of SEQ ID NO; 2360; 2368; 2376; 2384; 2392; 2400; 2408; 2416; 2424; or 2432.

[0025] In another aspect, the anti-CD3 antibody or binding fragment thereof comprises: a heavy chain variable domain (VH) comprising complementarity determining regions CDR1 to CDR3, comprising the amino acid sequence triplets; 1941, 1942, 1943; 1946, 1947, 1948; 1951, 1952, 1953; 1956, 1957, 1958; 1961, 1962, 1963; 1966, 1967, 1968; 1971, 1972, 1973; 1976, 1977, 1978; 1981, 1982, 1983; 1986, 1987, 1988; 1991, 1992, 1993; 1996, 1997, 1998; 2001, 2002, 2003; 2006, 2007, 2008; 2011, 2012, 2013; 2016, 2017, 2018; 2021, 2022, 2023; 2026, 2027, 2028; 2031, 2032, 2033; 2036, 2037, 2038; 2041, 2042, 2043; 2046, 2047, 2048; 2051, 2052, 2053; 2056, 2057, 2058; 2061, 2062, 2063; 2066, 2067, 2068; 2071, 2072, 2073; 2076, 2077, 2078; 2081, 2082, 2083; 2086, 2087, 2088; 2091, 2092, 2093; 2096, 2097, 2098; 2101, 2102, 2103; 2106, 2107, 2108; 2111, 2112, 2113; 2116, 2117, 2118; 2121, 2122, 2123; 2126, 2127, 2128; 2131, 2132, 2133; 2136, 2137, 2138; 2141, 2142, 2143; 2146, 2147, 2148; 2151, 2152, 2153; 2156, 2157, 2158; 2161, 2162, 2163; 2166, 2167, 2168; 2171, 2172, 2173; 2176, 2177, 2178; 2181, 2182, 2183; or 2186, 2187, 2188; and a light chain variable domain (VL) comprising complementarity determining regions CDR1 to CDR3, comprising the amino acid sequence triplets; 2191, 2192, 2193; 2196, 2197, 2198; 2201, 2202, 2203; 2206, 2207, 2208; 2211, 2212, 2213; 2216, 2217, 2218; 2221, 2222, 2223; 2226, 2227, 2228; 2231, 2232, 2233; 2236, 2237, 2238; 2241, 2242, 2243; 2246, 2247, 2248; 2251, 2252, 2253; 2256, 2257, 2258; 2261, 2262, 2263; 2266, 2267, 2268; 2271, 2272, 2273; 2276, 2277, 2278; 2281, 2282, 2283; 2286, 2287, 2288; 2291, 2292, 2293; 2296, 2297, 2298; 2301, 2302, 2303; 2306, 2307, 2308; 2311, 2312, 2313; 2316, 2317, 2318; 2321, 2322, 2323; 2326, 2327, 2328; 2331, 2332, 2333; or 2336, 2337, 2338; 2360; 2368; 2376; 2384; 2392; 2400; 2408; 2416; 2424; or 2432.

[0026] In another aspect, the antigen or a tumor associated antigen is selected from 4-1BBL, AFP, AKAP-4, ALK, androgen receptor, bcr-abl, C1orf186, CA-125, CA6, CA6, CA19-9, CAMPATH-1, Carbonic anhydrase IX, carcinoembryonic antigen (CEA), CCR8, CDI, CD2, CD3, CD4, CD5, CD8, CD16A, CD19, CD1A, CD20, CD204, CD204, CD204, CD206, CD206, CD206, CD25, CD276, CD28, CD30, CD301, CD301, CD32A, CD32B, CD33, CD36, CD37, CD39, CD40, CD45, CD47, CD5, CD64, CD73, CEA, CLEC4C, CLDN16, CLDN6, CLDN18.2, CLEC10A, CLEC12A, CLEC5A, CLEC9A, CMET, CTCFL, cyclin B1, CYP1B1, DC-SIGN, DEC-205, Dectin1, Dectin2, DLL3, EGFR, EGFRVIII, Endoglin, endosialin, EPCAM, EphA2, epidermal growth factor, ERG, ETV6-AML, ferritin, fibroblast activation protein (FAP), FLT3, folate-binding protein, Fos-related antigen 1, FRA, fucosyl GM1, G250, GD2, GD3, Glycoprotein A33, GloboH, GLP-3, GM2, GM3, gp100, HER2, HER2/neu, HER3, HLD-DR, HMWMAA, HPV E6, HPV E7, hTERT, HVEM, IL-2 receptor, IV1, Latent-TGFB, LCK, Legumain, Ley, LIV1, LMP2, LY6E, MAD-CT-1, MAD-CT-2, MAGE A1, MAGE A3, mannose scavenger receptor1, MARCO, MelanA/MARTI, mesothelin (MSLN), metalloproteinase, ML-IAP, MSLN, MUC1, MUC15, MUC16, MYCN, myostatin, NA17, NAPI2B, NAPI2B, NY-BR-1, NY-ESO-1, OX40L, OY-TESI, p185HER2, P53 mutant, P53 nonmutant, PAGE4, PAP, PAX3, PAX5, PDGFR-B, PDL, PDL1, PLAV1, polysialic acid, PRI, PSA, PSCA, PSMA, PTK7, Ras mutant, RGS5, RhoC, RON, ROR1, ROR2, RRC15, SART3, SIRPA, Sperm protein 17, SSX2, STn, survivin, TAG-72, tenascin, TGFB, Tic 3, TMEM238, TMPRSS3, TMPRSS4, Tn, TRA6, TROP2, TRP-2, tyrosinase, UPK1B, vascular endothelial growth factor, VEGFR, VEGFR2, VISTA, VTCN1, WT1, XAGE 1, or Y6E. In another aspect, the bispecific, modulatable T cell engaging antibody or antigen binding fragments has a binding or activation that differs from the following antibodies: ABT806 (EGFRVIII), adecatumumab (EPCAM), alemtuzumab (CD33), AMG595 (EGFRVIII), anctumab (MSLN), anti-ACE2, anti-EphA2 (EphA2), anti-hyaluronidase, anti-neuraminidase, anti-NY-ESO-1, anti-PTK7 (PTK7), cetuximab (EGFR), cirmtuzumab (ROR1), clivatuzumab (MUC1), CT-011 (PD1), DS-8895a variant 1 (EphA2), DS-8895a variant 2 (EphA2), durvalumab (PDL1) anti-MAGE-A3, edrecolomab (EPCAM), farletuzumab (FRA/folate receptor alpha), Gemtuzumab ozogamicin (CD33), huDS6 (CA6), humanized Ab 2-3 (CEA), humanized PR1A3 (CEA), ibritumomab tiuxetan (CD52), IMAB362/claudiximab (Claudin18,2), ipilimumab (CTLA4), J591 variant 1 (PSMA), J591 variant 2 (PSMA), ladiratuzumab (LIV1), lifastuzumab (NAPI2B), MEDI-547 (EphA2), mirvetuximab (FRA), narnatumab (RON), nimotuzumab (EGFR), nivolumab (PD1), onartuzumab (c-MET), panitumumab (EGFR), patritumab (HER3), pembrolizumab (PD1), pertuzumab (HER2/neu), PF-06647020 (PTK7), RG7841 (LY6E), rituximab (CD20), rovalpituzumab (DLL3), sacituzumab (TROP2), sibrotuzumab (FAP), sofituzumab (MUC16), tositumomab (CD20), trastuzumab (HER2/neu), tremelimumab (CP-675,206) (CTLA4), zalutumumab (EGFR), or bispecific antibody or antigen binding fragments thereof.

[0027] In another aspect, the bispecific, modulatable T cell engaging antibody or antigen binding fragments have an Fc domain of any one of the following: human IgG1, human IgG2, human IgG3, human IgG4, or mutants thereof. In another aspect, the amino acids are selected from 2440, 2448, 2456, or 2464.

[0028] As embodied and broadly described herein, an aspect of the present disclosure relates to a polynucleotide encoding the bispecific, modulatable T cell engaging antibody or antigen binding fragments described hereinabove.

[0029] As embodied and broadly described herein, an aspect of the present disclosure relates to an expression vector comprising a nucleic acid encoding bispecific, modulatable T cell engaging antibody or antigen binding fragments described hereinabove.

[0030] As embodied and broadly described herein, an aspect of the present disclosure relates to a host cell comprising the vector described hereinabove.

[0031] As embodied and broadly described herein, an aspect of the present disclosure relates to a method of making a bispecific, modulatable T cell engaging antibody or antigen binding fragments comprising: culturing a cell comprising the polynucleotide described hereinabove, in a culture medium, expressing the polynucleotide, and collecting the bispecific, modulatable T cell engaging antibody or antigen binding fragments from the cells or culture medium.

[0032] As embodied and broadly described herein, an aspect of the present disclosure relates to a method of treating an antigen-expressing disease in a subject, comprising: administering the bispecific, modulatable T cell engaging antibody or antigen binding fragments described hereinabove to the patient, whereby a cytolytic T cell response to the disease is induced. In one aspect, the disease is selected from the disease is an autoimmune disease, an inflammatory disease, an infectious disease, or a cancer. In another aspect, the cancer is selected from: acute lymphoblastic leukemia, acute myelogenous leukemia, adrenal glands cancer, bladder cancer, bone marrow cancer, breast cancer, chronic lymphocytic leukemia, chronic myeloid leukemia, central nervous system cancer, colorectal cancer, colorectal carcinoma, endometrial cancer, endometrial carcinoma, gastric cancer, gut carcinoma, head and neck squamous cell carcinoma, hematopoietic malignancies, liver cancer, lung carcinoma, lymph node cancer, melanoma, metastatic colorectal cancer, ovarian cancer, pancreatic adenocarcinoma, pituitary tumor, prostate cancer, prostate carcinoma, renal cell carcinoma, retinal cancer, sarcoma, skin cancer, spleen cancer, stomach cancer, thymus cancer, or thyroid cancer. In another aspect, the subject is human. In another aspect, a first bispecific antibody or antigen binding fragment having a predetermined activity is used during a first phase of treatment, and a second bispecific antibody or antigen binding fragment having a predetermined activity is used during a second phase of treatment, and optionally using one or more different bispecific antibody or antigen binding fragment having a predetermined activity is used during a first phase of treatment for any additional phases of treatment.

[0033] As embodied and broadly described herein, an aspect of the present disclosure relates to a method of selecting an antigen and an anti-CD3 bispecific, modulatable T cell engaging antibody or antigen binding fragments comprising: selecting an antibody against the antigen; generating the bispecific, modulatable T cell engaging antibody or antigen binding fragments with at least one anti-CD3 antibody or antigen binding fragments, wherein the anti-CD3 antibody or antigen binding fragments have different T cell activating activities; contacting the bispecific, modulatable T cell engaging antibody or antigen binding fragments with a T cell under conditions in which the T cell is activated; measuring the T cell activation; and selecting the combination of antigen bispecific, modulatable T cell engaging antibody or antigen binding fragments having a predetermined activity level. In one aspect, the bispecific antibody comprises an scFV-Fc-ScFv bispecific antibody. In another aspect, the bispecific antibody comprises a tandem scFv-scFv-Fc. In another aspect, the activity is selected from at least one of: T cell killing, CD8 T cell activation, TNF-alpha secretion, IFN-gamma secretion, IL-2 secretion, IL-10 secretion, antigen binding, or CD3 binding. In another aspect, the anti-CD3 antibody or binding fragment thereof are selected from:
[0034] a. a heavy chain variable domain (VH) complementarity determining region 1 (CDR1) comprising the amino acid sequence of any one of the following SEQ ID NOs: 1, 11, 21, 31, 41, 51, 61, 71, 81, 91, 101, 111, 121, 131, 141, 151, 161, 171, 181, 191, 201, 211, 221, 231, 241, 251, 261, 271, 281, 291, 301, 311, 321, 331, 341, 351, 361, 371, 381, 391, 401, 411, 421, 431, 441, 451, 461, 471, 481, 491, 501, 511, 521, 531, 541, 551, 561, 571, 581, 591, 601, 611, 621, 631, 641, 651, 661, 671, 681, 691, 701, 711, 721, 731, 741, 751, 761, 771, 781, 791, 801, 811, 821, 831, 841, 851, 861, 871, 881, 891, 901, 911, 921, 931, 941, 951, 961, 971, 981, 991, 1001, 1011, 1021, 1031, 1041, 1051, 1061, 1071, 1081, 1091, 1101, 1111, 1121, 1131, 1141, 1151, 1161, 1171, 1181, 1191, 1201, 1211, 1221, 1231, 1241, 1251, 1261, 1271, 1281, 1291, 1301, 1311, 1321, 1331, 1341, 1351, 1361, 1371, 1381, 1391, 1401, 1411, 1421, 1431, 1441, 1451, 1461, 1471, 1481, 1491, 1501, 1511, 1521, 1531, 1541, 1551, 1561, 1571, 1581, 1591, 1601, 1611, 1621, 1631, 1641, 1651, 1661, 1671, 1681, 1691, 1701, 1711, 1721, 1731, 1741, 1751, 1761, 1771, 1781, 1791, 1801, 1811, 1821, 1831, 1841, 1851, 1861, 1871, 1881, 1891, 1901, 1911, 1916, 1921, 1926, 1931, 1936, 1941, 1946, 1951, 1956, 1961, 1966, 1971, 1976, 1981, 1986, 1991, 1996, 2001, 2006, 2011, 2016, 2021, 2026, 2031, 2036, 2041, 2046, 2051, 2056, 2061, 2066, 2071, 2076, 2081, 2086, 2091, 2096, 2101, 2106, 2111, 2116, 2121, 2126, 2131, 2136, 2141, 2146, 2151, 2156, 2161, 2166, 2171, 2176, 2181, or 2186; and
[0035] b. a VH CDR2 comprising the amino acid sequence of any one of the following SEQ ID NOs: 2, 12, 22, 32, 42, 52, 62, 72, 82, 92, 102, 112, 122, 132, 142, 152, 162, 172, 182, 192, 202, 212, 222, 232, 242, 252, 262, 272, 282, 292, 302, 312, 322, 332, 342, 352, 362, 372, 382, 392, 402, 412, 422, 432, 442, 452, 462, 472, 482, 492, 502, 512, 522, 532, 542, 552, 562, 572, 582, 592, 602, 612, 622, 632, 642, 652, 662, 672, 682, 692, 702, 712, 722, 732, 742, 752, 762, 772, 782, 792, 802, 812, 822, 832, 842, 852, 862, 872, 882, 892, 902, 912, 922, 932, 942, 952, 962, 972, 982, 992, 1002, 1012, 1022, 1032, 1042, 1052, 1062, 1072, 1082, 1092, 1102, 1112, 1122, 1132, 1142, 1152, 1162, 1172, 1182, 1192, 1202, 1212, 1222, 1232, 1242, 1252, 1262, 1272, 1282, 1292, 1302, 1312, 1322, 1332, 1342, 1352, 1362, 1372, 1382, 1392, 1402, 1412, 1422, 1432, 1442, 1452, 1462, 1472, 1482, 1492, 1502, 1512, 1522, 1532, 1542, 1552, 1562, 1572, 1582, 1592, 1602, 1612, 1622, 1632, 1642, 1652, 1662, 1672, 1682, 1692, 1702, 1712, 1722, 1732, 1742, 1752, 1762, 1772, 1782, 1792, 1802, 1812, 1822, 1832, 1842, 1852, 1862, 1872, 1882, 1892, 1902, 1912, 1917, 1922, 1927, 1932, 1937, 1942, 1947, 1952, 1957, 1962, 1967, 1972, 1977, 1982, 1987, 1992, 1997, 2002, 2007, 2012, 2017, 2022, 2027, 2032, 2037, 2042, 2047, 2052, 2057, 2062, 2067, 2072, 2077, 2082, 2087, 2092, 2097, 2102, 2107, 2112, 2117, 2122, 2127, 2132, 2137, 2142, 2147, 2152, 2157, 2162, 2167, 2172, 2177, 2182, or 2187; and
[0036] c. a VH CDR3 comprising the amino acid sequence of any one of the following SEQ ID NOs: 3, 13, 23, 33, 43, 53, 63, 73, 83, 93, 103, 113, 123, 133, 143, 153, 163, 173, 183, 193, 203, 213, 223, 233, 243, 253, 263, 273, 283, 293, 303, 313, 323, 333, 343, 353, 363, 373, 383, 393, 403, 413, 423, 433, 443, 453, 463, 473, 483, 493, 503, 513, 523, 533, 543, 553, 563, 573, 583, 593, 603, 613, 623, 633, 643, 653, 663, 673, 683, 693, 703, 713, 723, 733, 743, 753, 763, 773, 783, 793, 803, 813, 823, 833, 843, 853, 863, 873, 883, 893, 903, 913, 923, 933, 943, 953, 963, 973, 983, 993, 1003, 1013, 1023, 1033, 1043, 1053, 1063, 1073, 1083, 1093, 1103, 1113, 1123, 1133, 1143, 1153, 1163, 1173, 1183, 1193, 1203, 1213, 1223, 1233, 1243, 1253, 1263, 1273, 1283, 1293, 1303, 1313, 1323, 1333, 1343, 1353, 1363, 1373, 1383, 1393, 1403, 1413, 1423, 1433, 1443, 1453, 1463, 1473, 1483, 1493, 1503, 1513, 1523, 1533, 1543, 1553, 1563, 1573, 1583, 1593, 1603, 1613, 1623, 1633, 1643, 1653, 1663, 1673, 1683, 1693, 1703, 1713, 1723, 1733, 1743, 1753, 1763, 1773, 1783, 1793, 1803, 1813, 1823, 1833, 1843, 1853, 1863, 1873, 1883, 1893, 1903, 1913, 1918, 1923, 1928, 1933, 1938, 1943, 1948, 1953, 1958, 1963, 1968, 1973, 1978, 1983, 1988, 1993, 1998, 2003, 2008, 2013, 2018, 2023, 2028, 2033, 2038, 2043, 2048, 2053, 2058, 2063, 2068, 2073, 2078, 2083, 2088, 2093, 2098, 2103, 2108, 2113, 2118, 2123, 2128, 2133, 2138, 2143, 2148, 2153, 2158, 2163, 2168, 2173, 2178, 2183, or 2188; and
[0037] d. a light chain variable domain (VL) CDR1 comprising the amino acid sequence of any one of the following SEQ ID NOs: 6, 16, 26, 36, 46, 56, 66, 76, 86, 96, 106, 116, 126, 136, 146, 156, 166, 176, 186, 196, 206, 216, 226, 236, 246, 256, 266, 276, 286, 296, 306, 316, 326, 336, 346, 356, 366, 376, 386, 396, 406, 416, 426, 436, 446, 456, 466, 476, 486, 496, 506, 516, 526, 536, 546, 556, 566, 576, 586, 596, 606, 616, 626, 636, 646, 656, 666, 676, 686, 696, 706, 716, 726, 736, 746, 756, 766, 776, 786, 796, 806, 816, 826, 836, 846, 856, 866, 876, 886, 896, 906, 916, 926, 936, 946, 956, 966, 976, 986, 996, 1006, 1016, 1026, 1036, 1046, 1056, 1066, 1076, 1086, 1096, 1106, 1116, 1126, 1136, 1146, 1156, 1166, 1176, 1186, 1196, 1206, 1216, 1226, 1236, 1246, 1256, 1266, 1276, 1286, 1296, 1306, 1316, 1326, 1336, 1346, 1356, 1366, 1376, 1386, 1396, 1406, 1416, 1426, 1436, 1446, 1456, 1466, 1476, 1486, 1496, 1506, 1516, 1526, 1536, 1546, 1556, 1566, 1576, 1586, 1596, 1606, 1616, 1626, 1636, 1646, 1656, 1666, 1676, 1686, 1696, 1706, 1716, 1726, 1736, 1746, 1756, 1766, 1776, 1786, 1796, 1806, 1816, 1826, 1836, 1846, 1856, 1866, 1876, 1886, 1896, 1906, 2161, 2166, 2171, 2176, 2181, 2186, 2191, 2196, 2201, 2206, 2211, 2216, 2221, 2226, 2231, 2236, 2241, 2246, 2251, 2256, 2261, 2266, 2271, 2276, 2281, 2286, 2291, 2296, 2301, 2306, 2311, 2316, 2321, 2326, 2331, or 2336; and
[0038] e. a VL CDR2 comprising the amino acid sequence of any one of the following SEQ ID NOs: 7, 17, 27, 37, 47, 57, 67, 77, 87, 97, 107, 117, 127, 137, 147, 157, 167, 177, 187, 197, 207, 217, 227, 237, 247, 257, 267, 277, 287, 297, 307, 317, 327, 337, 347, 357, 367, 377, 387, 397, 407, 417, 427, 437, 447, 457, 467, 477, 487, 497, 507, 517, 527, 537, 547, 557, 567, 577, 587, 597, 607, 617, 627, 637, 647, 657, 667, 677, 687, 697, 707, 717, 727, 737, 747, 757, 767, 777, 787, 797, 807, 817, 827, 837, 847, 857, 867, 877, 887, 897, 907, 917, 927, 937, 947, 957, 967, 977, 987, 997, 1007, 1017, 1027, 1037, 1047, 1057, 1067, 1077, 1087, 1097, 1107, 1117, 1127, 1137, 1147, 1157, 1167, 1177, 1187, 1197, 1207, 1217, 1227, 1237, 1247, 1257, 1267, 1277, 1287, 1297, 1307, 1317, 1327, 1337, 1347, 1357, 1367, 1377, 1387, 1397, 1407, 1417, 1427, 1437, 1447, 1457, 1467, 1477, 1487, 1497, 1507, 1517, 1527, 1537, 1547, 1557, 1567, 1577, 1587, 1597, 1607, 1617, 1627, 1637, 1647, 1657, 1667, 1677, 1687, 1697, 1707, 1717, 1727, 1737, 1747, 1757, 1767, 1777, 1787, 1797, 1807, 1817, 1827, 1837, 1847, 1857, 1867, 1877, 1887, 1897, 1907, 2162, 2167, 2172, 2177, 2182, 2187, 2192, 2197, 2202, 2207, 2212, 2217, 2222, 2227, 2232, 2237, 2242, 2247, 2252, 2257, 2262, 2267, 2272, 2277, 2282, 2287, 2292, 2297, 2302, 2307, 2312, 2317, 2322, 2327, 2332, or 2337; and
[0039] f. a VL CDR3 comprising the amino acid sequence of any one of the following SEQ ID NOs: 8, 18, 28, 38, 48, 58, 68, 78, 88, 98, 108, 118, 128, 138, 148, 158, 168, 178, 188, 198, 208, 218, 228, 238, 248, 258, 268, 278, 288, 298, 308, 318, 328, 338, 348, 358, 368, 378, 388, 398, 408, 418, 428, 438, 448, 458, 468, 478, 488, 498, 508, 518, 528, 538, 548, 558, 568, 578, 588, 598, 608, 618, 628, 638, 648, 658, 668, 678, 688, 698, 708, 718, 728, 738, 748, 758, 768, 778, 788, 798, 808, 818, 828, 838, 848, 858, 868, 878, 888, 898, 908, 918, 928, 938, 948, 958, 968, 978, 988, 998, 1008, 1018, 1028, 1038, 1048, 1058, 1068, 1078, 1088, 1098, 1108, 1118, 1128, 1138, 1148, 1158, 1168, 1178, 1188, 1198, 1208, 1218, 1228, 1238, 1248, 1258, 1268, 1278, 1288, 1298, 1308, 1318, 1328, 1338, 1348, 1358, 1368, 1378, 1388, 1398, 1408, 1418, 1428, 1438, 1448, 1458, 1468, 1478, 1488, 1498, 1508, 1518, 1528, 1538, 1548, 1558, 1568, 1578, 1588, 1598, 1608, 1618, 1628, 1638, 1648, 1658, 1668, 1678, 1688, 1698, 1708, 1718, 1728, 1738, 1748, 1758, 1768, 1778, 1788, 1798, 1808, 1818, 1828, 1838, 1848, 1858, 1868, 1878, 1888, 1898, 1908, 2163, 2168, 2173, 2178, 2183, 2188, 2193, 2198, 2203, 2208, 2213, 2218, 2223, 2228, 2233, 2238, 2243, 2248, 2253, 2258, 2263, 2268, 2273, 2278, 2283, 2288, 2293, 2298, 2303, 2308, 2313, 2318, 2323, 2328, 2333, or 2338.

[0040] In another aspect, the anti-CD3 antibody or binding fragment thereof comprises:
[0041] a. a heavy chain comprising the amino acid sequence of any one of the following SEQ ID NOs: 4, 14, 24, 34, 44, 54, 64, 74, 84, 94, 104, 114, 124, 134, 144, 154, 164, 174, 184, 194, 204, 214, 224, 234, 244, 254, 264, 274, 284, 294, 304, 314, 324, 334, 344, 354, 364, 374, 384, 394, 404, 414, 424, 434, 444, 454, 464, 474, 484, 494, 504, 514, 524, 534, 544, 554, 564, 574, 584, 594, 604, 614, 624, 634, 644, 654, 664, 674, 684, 694, 704, 714, 724, 734, 744, 754, 764, 774, 784, 794, 804, 814, 824, 834, 844, 854, 864, 874, 884, 894, 904, 914, 924, 934, 944, 954, 964, 974, 984, 994, 1004, 1014, 1024, 1034, 1044, 1054, 1064, 1074, 1084, 1094, 1104, 1114, 1124, 1134, 1144, 1154, 1164, 1174, 1184, 1194, 1204, 1214, 1224, 1234, 1244, 1254, 1264, 1274, 1284, 1294, 1304, 1314, 1324, 1334, 1344, 1354, 1364, 1374, 1384, 1394, 1404, 1414, 1424, 1434, 1444, 1454, 1464, 1474, 1484, 1494, 1504, 1514, 1524, 1534, 1544, 1554, 1564, 1574, 1584, 1594, 1604, 1614, 1624, 1634, 1644, 1654, 1664, 1674, 1684, 1694, 1704, 1714, 1724, 1734, 1744, 1754, 1764, 1774, 1784, 1794, 1804, 1814, 1824, 1834, 1844, 1854, 1864, 1874, 1884, 1894, 1904, 1914, 1919, 1924, 1929, 1934, 1939, 1944, 1949, 1954, 1959, 1964, 1969, 1974, 1979, 1984, 1989, 1994, 1999, 2004, 2009, 2014, 2019, 2024, 2029, 2034, 2039, 2044, 2049, 2054, 2059, 2064, 2069, 2074, 2079, 2084, 2089, 2094, 2099, 2104, 2109, 2114, 2119, 2124, 2129, 2134, 2139, 2144, 2149, 2154, 2159, 2164, 2169, 2174, 2179, 2184, or 2189, and
[0042] b. a light chain comprising the amino acid sequence of any one of the following SEQ ID NOs: 9, 19, 29, 39, 49, 59, 69, 79, 89, 99, 109, 119, 129, 139, 149, 159, 169, 179, 189, 199, 209, 219, 229, 239, 249, 259, 269, 279, 289, 299, 309, 319, 329, 339, 349, 359, 369, 379, 389, 399, 409, 419, 429, 439, 449, 459, 469, 479, 489, 499, 509, 519, 529, 539, 549, 559, 569, 579, 589, 599, 609, 619, 629, 639, 649, 659, 669, 679, 689, 699, 709, 719, 729, 739, 749, 759, 769, 779, 789, 799, 809, 819, 829, 839, 849, 859, 869, 879, 889, 899, 909, 919, 929, 939, 949, 959, 969, 979, 989, 999, 1009, 1019, 1029, 1039, 1049, 1059, 1069, 1079, 1089, 1099, 1109, 1119, 1129, 1139, 1149, 1159, 1169, 1179, 1189, 1199, 1209, 1219, 1229, 1239, 1249, 1259, 1269, 1279, 1289, 1299, 1309, 1319, 1329, 1339, 1349, 1359, 1369, 1379, 1389, 1399, 1409, 1419, 1429, 1439, 1449, 1459, 1469, 1479, 1489, 1499, 1509, 1519, 1529, 1539, 1549, 1559, 1569, 1579, 1589, 1599, 1609, 1619, 1629, 1639, 1649, 1659, 1669, 1679, 1689, 1699, 1709, 1719, 1729, 1739, 1749, 1759, 1769, 1779, 1789, 1799, 1809, 1819, 1829, 1839, 1849, 1859, 1869, 1879, 1889, 1899, 1909, 2164, 2169, 2174, 2179, 2184, 2189, 2194, 2199, 2204, 2209, 2214, 2219, 2224, 2229, 2234, 2239, 2244, 2249, 2254, 2259, 2264, 2269, 2274, 2279, 2284, 2289, 2294, 2299, 2304, 2309, 2314, 2319, 2324, 2329, 2334, or 2339; or
[0043] c. an scFV selected from SEQ ID NOS: 2360; 2368; 2376; 2384; 2392; 2400; 2408; 2416; 2424; or 2432.

[0044] In another aspect, the anti-CD3 antibody or binding fragment thereof is encoded by a nucleic acid that comprises:
[0045] a. a VH comprising the nucleic acid sequence of any one of the following SEQ ID NOS: 5, 15, 25, 35, 45, 55, 65, 75, 85, 95, 105, 115, 125, 135, 145, 155, 165, 175, 185, 195, 205, 215, 225, 235, 245, 255, 265, 275, 285, 295, 305, 315, 325, 335, 345, 355, 365, 375, 385, 395, 405, 415, 425, 435, 445, 455, 465, 475, 485, 495, 505, 515, 525, 535, 545, 555, 565, 575, 585, 595, 605, 615, 625, 635, 645, 655, 665, 675, 685, 695, 705, 715, 725, 735, 745, 755, 765, 775, 785, 795, 805, 815, 825, 835, 845, 855, 865, 875, 885, 895, 905, 915, 925, 935, 945, 955, 965, 975, 985, 995, 1005, 1015, 1025, 1035, 1045, 1055, 1065, 1075, 1085, 1095, 1105, 1115, 1125, 1135, 1145, 1155, 1165, 1175, 1185, 1195, 1205, 1215, 1225, 1235, 1245, 1255, 1265, 1275, 1285, 1295, 1305, 1315, 1325, 1335, 1345, 1355, 1365, 1375, 1385, 1395, 1405, 1415, 1425, 1435, 1445, 1455, 1465, 1475, 1485, 1495, 1505, 1515, 1525, 1535, 1545, 1555, 1565, 1575, 1585, 1595, 1605, 1615, 1625, 1635, 1645, 1655, 1665, 1675, 1685, 1695, 1705, 1715, 1725, 1735, 1745, 1755, 1765, 1775, 1785, 1795, 1805, 1815, 1825, 1835, 1845, 1855, 1865, 1875, 1885, 1895, 1905, 1915, 1920, 1925, 1930, 1935, 1940, 1945, 1950, 1955, 1960, 1965, 1970, 1975, 1980, 1985, 1990, 1995, 2000, 2005, 2010, 2015, 2020, 2025, 2030, 2035, 2040, 2045, 2050, 2055, 2060, 2065, 2070, 2075, 2080, 2085, 2090, 2095, 2100, 2105, 2110, 2115, 2120, 2125, 2130, 2135, 2140, 2145, 2150, 2155, 2160, 2165, 2170, 2175, 2180, 2185, or 2190, and
[0046] b. a VL comprising the nucleic acid sequence of any one of the following SEQ ID NOs: 10, 20, 30, 40, 50, 60, 70, 80, 90, 100, 110, 120, 130, 140, 150, 160, 170, 180, 190, 200, 210, 220, 230, 240, 250, 260, 270, 280, 290, 300, 310, 320, 330, 340, 350, 360, 370, 380, 390, 400, 410, 420, 430, 440, 450, 460, 470, 480, 490, 500, 510, 520, 530, 540, 550, 560, 570, 580, 590, 600, 610, 620, 630, 640, 650, 660, 670, 680, 690, 700, 710, 720, 730, 740, 750, 760, 770, 780, 790, 800, 810, 820, 830, 840, 850, 860, 870, 880, 890, 900, 910, 920, 930, 940, 950, 960, 970, 980, 990, 1000, 1010, 1020, 1030, 1040, 1050, 1060, 1070, 1080, 1090, 1100, 1110, 1120, 1130, 1140, 1150, 1160, 1170, 1180, 1190, 1200, 1210, 1220, 1230, 1240, 1250, 1260, 1270, 1280, 1290, 1300, 1310, 1320, 1330, 1340, 1350, 1360, 1370, 1380, 1390, 1400, 1410, 1420, 1430, 1440, 1450, 1460, 1470, 1480, 1490, 1500, 1510, 1520, 1530, 1540, 1550, 1560, 1570, 1580, 1590, 1600, 1610, 1620, 1630, 1640, 1650, 1660, 1670, 1680, 1690, 1700, 1710, 1720, 1730, 1740, 1750, 1760, 1770, 1780, 1790, 1800, 1810, 1820, 1830, 1840, 1850, 1860, 1870, 1880, 1890, 1900, 1910, 2165, 2170, 2175, 2180, 2185, 2190, 2195, 2200, 2205, 2210, 2215, 2220, 2225, 2230, 2235, 2240, 2245, 2250, 2255, 2260, 2265, 2270, 2275, 2280, 2285, 2290, 2295, 2300, 2305, 2310, 2315, 2320, 2325, 2330, 2335, or 2340; or
[0047] c. a nucleic acid encoding a scFV selected from SEQ ID NOS: 2361; 2369; 2377; 2385; 2393; 2401; 2409; 2417; 2425; or 2433.

[0048] In another aspect, the the anti-CD3 antibody or binding fragment thereof comprises: a heavy chain variable domain (VH) comprising complementarity determining regions CDR1 to CDR3, comprising the amino acid sequence triplets: 1, 2, 3; 11, 12, 13; 21, 22, 23; 31, 32, 33; 41, 42, 43; 51, 52, 53; 61, 62, 63; 71, 72, 73; 81, 82, 83; 91, 92, 93; 101, 102, 103; 111, 112, 113; 121, 122, 123; 131, 132, 133; 141, 142, 143; 151, 152, 153; 161, 162, 163; 171, 172, 173; 181, 182, 183; 191, 192, 193; 201, 202, 203; 211, 212, 213; 221, 222, 223; 231, 232, 233; 241, 242, 243; 251, 252, 253; 261, 262, 263; 271, 272, 273; 281, 282, 283; 291, 292, 293; 301, 302, 303; 311, 312, 313; 321, 322, 323; 331, 332, 333; 341, 342, 343; 351, 352, 353; 361, 362, 363; 371, 372, 373; 381, 382, 383; 391, 392, 393; 401, 402, 403; 411, 412, 413; 421, 422, 423; 431, 432, 433; 441, 442, 443; 451, 452, 453; 461, 462, 463; 471, 472, 473; 481, 482, 483; 491, 492, 493; 501, 502, 503; 511, 512, 513; 521, 522, 523; 531, 532, 533; 541, 542, 543; 551, 552, 553; 561, 562, 563; 571, 572, 573; 581, 582, 583; 591, 592, 593; 601, 602, 603; 611, 612, 613; 621, 622, 623; 631, 632, 633; 641, 642, 643; 651, 652, 653; 661, 662, 663; 671, 672, 673; 681, 682, 683; 691, 692, 693; 701, 702, 703; 711, 712, 713; 721, 722, 723; 731, 732, 733; 741, 742, 743; 751, 752, 753; 761, 762, 763; 771, 772, 773; 781, 782, 783; 791, 792, 793; 801, 802, 803; 811, 812, 813; 821, 822, 823; 831, 832, 833; 841, 842, 843; 851, 852, 853; 861, 862, 863; 871, 872, 873; 881, 882, 883; 891, 892, 893; 901, 902, 903; 911, 912, 913; 921, 922, 923; 931, 932, 933; 941, 942, 943; 951, 952, 953; 961, 962, 963; 971, 972, 973; 981, 982, 983; 991, 992, 993; 1001, 1002, 1003; 1011, 1012, 1013; 1021, 1022, 1023; 1031, 1032, 1033; 1041, 1042, 1043; 1051, 1052, 1053; 1061, 1062, 1063; 1071, 1072, 1073; 1081, 1082, 1083; 1091, 1092, 1093; 1101, 1102, 1103; 1111, 1112, 1113; 1121, 1122, 1123; 1131, 1132, 1133; 1141, 1142, 1143; 1151, 1152, 1153; 1161, 1162, 1163; 1171, 1172, 1173; 1181, 1182, 1183; 1191, 1192, 1193; 1201, 1202, 1203; 1211, 1212, 1213; 1221, 1222, 1223; 1231, 1232, 1233; 1241, 1242, 1243; 1251, 1252, 1253; 1261, 1262, 1263; 1271, 1272, 1273; 1281, 1282, 1283; 1291, 1292, 1293; 1301, 1302, 1303; 1311, 1312, 1313; 1321, 1322, 1323; 1331, 1332, 1333; 1341, 1342, 1343; 1351, 1352, 1353; 1361, 1362, 1363; 1371, 1372, 1373; 1381, 1382, 1383; 1391, 1392, 1393; 1401, 1402, 1403; 1411, 1412, 1413; 1421, 1422, 1423; 1431, 1432, 1433; 1441, 1442, 1443; 1451, 1452, 1453; 1461, 1462, 1463; 1471, 1472, 1473; 1481, 1482, 1483; 1491, 1492, 1493; 1501, 1502, 1503; 1511, 1512, 1513; 1521, 1522, 1523; 1531, 1532, 1533; 1541, 1542, 1543; 1551, 1552, 1553; 1561, 1562, 1563; 1571, 1572, 1573; 1581, 1582, 1583; 1591, 1592, 1593; 1601, 1602, 1603; 1611, 1612, 1613; 1621, 1622, 1623; 1631, 1632, 1633; 1641, 1642, 1643; 1651, 1652, 1653; 1661, 1662, 1663; 1671, 1672, 1673; 1681, 1682, 1683; 1691, 1692, 1693; 1701, 1702, 1703; 1711, 1712, 1713; 1721, 1722, 1723; 1731, 1732, 1733; 1741, 1742, 1743; 1751, 1752, 1753; 1761, 1762, 1763; 1771, 1772, 1773; 1781, 1782, 1783; 1791, 1792, 1793; 1801, 1802, 1803; 1811, 1812, 1813; 1821, 1822, 1823; 1831, 1832, 1833; 1841, 1842, 1843; 1851, 1852, 1853; 1861, 1862, 1863; 1871, 1872, 1873; 1881, 1882, 1883; 1891, 1892, 1893; 1901, 1902, 1903; 1911, 1912, 1913; 1921, 1922, 1923; or 1931, 1932, 1933; and a light chain variable domain (VL) comprising complementarity determining regions CDR1 to CDR3, comprising the amino acid sequence triplets: 6, 7, 8; 16, 17, 18; 26, 27, 28; 36, 37, 38; 46, 47, 48; 56, 57, 58; 66, 67, 68; 76, 77, 78; 86, 87, 88; 96, 97, 98; 106, 107, 108; 116, 117, 118; 126, 127, 128; 136, 137, 138; 146, 147, 148; 156, 157, 158; 166, 167, 168; 176, 177, 178; 186, 187, 188; 196, 197, 198; 206, 207, 208; 216, 217, 218; 226, 227, 228; 236, 237, 238; 246, 247, 248; 256, 257, 258; 266, 267, 268; 276, 277, 278; 286, 287, 288; 296, 297, 298; 306, 307, 308; 316, 317, 318; 326, 327, 328; 336, 337, 338; 346, 347, 348; 356, 357, 358; 366, 367, 368; 376, 377, 378; 386, 387, 388; 396, 397, 398; 406, 407, 408; 416, 417, 418; 426, 427, 428; 436, 437, 438; 446, 447, 448; 456, 457, 458; 466, 467, 468; 476, 477, 478; 486, 487, 488; 496, 497, 498; 506, 507, 508; 516, 517, 518; 526, 527, 528; 536, 537, 538; 546, 547, 548; 556, 557, 558; 566, 567, 568; 576, 577, 578; 586, 587, 588; 596, 597, 598; 606, 607, 608; 616, 617, 618; 626, 627, 628; 636, 637, 638; 646, 647, 648; 656, 657, 658; 666, 667, 668; 676, 677, 678; 686, 687, 688; 696, 697, 698; 706, 707, 708; 716, 717, 718; 726, 727, 728; 736, 737, 738; 746, 747, 748; 756, 757, 758; 766, 767, 768; 776, 777, 778; 786, 787, 788; 796, 797, 798; 806, 807, 808; 816, 817, 818; 826, 827, 828; 836, 837, 838; 846, 847, 848; 856, 857, 858; 866, 867, 868; 876, 877, 878; 886, 887, 888; 896, 897, 898; 906, 907, 908; 916, 917, 918; 926, 927, 928; 936, 937, 938; 946, 947, 948; 956, 957, 958; 966, 967, 968; 976, 977, 978; 986, 987, 988; 996, 997, 998; 1006, 1007, 1008; 1016, 1017, 1018; 1026, 1027, 1028; 1036, 1037, 1038; 1046, 1047, 1048; 1056, 1057, 1058; 1066, 1067, 1068; 1076, 1077, 1078; 1086, 1087, 1088; 1096, 1097, 1098; 1106, 1107, 1108; 1116, 1117, 1118; 1126, 1127, 1128; 1136, 1137, 1138; 1146, 1147, 1148; 1156, 1157, 1158; 1166, 1167, 1168; 1176, 1177, 1178; 1186, 1187, 1188; 1196, 1197, 1198; 1206, 1207, 1208; 1216, 1217, 1218; 1226, 1227, 1228; 1236, 1237, 1238; 1246, 1247, 1248; 1256, 1257, 1258; 1266, 1267, 1268; 1276, 1277, 1278; 1286, 1287, 1288; 1296, 1297, 1298; 1306, 1307, 1308; 1316, 1317, 1318; 1326, 1327, 1328; 1336, 1337, 1338; 1346, 1347, 1348; 1356, 1357, 1358; 1366, 1367, 1368; 1376, 1377, 1378; 1386, 1387, 1388; 1396, 1397, 1398; 1406, 1407, 1408; 1416, 1417, 1418; 1426, 1427, 1428; 1436, 1437, 1438; 1446, 1447, 1448; 1456, 1457, 1458; 1466, 1467, 1468; 1476, 1477, 1478; 1486, 1487, 1488; 1496, 1497, 1498; 1506, 1507, 1508; 1516, 1517, 1518; 1526, 1527, 1528; 1536, 1537, 1538; 1546, 1547, 1548; 1556, 1557, 1558; 1566, 1567, 1568; 1576, 1577, 1578; 1586, 1587, 1588; 1596, 1597, 1598; 1606, 1607, 1608; 1616, 1617, 1618; 1626, 1627, 1628; 1636, 1637, 1638; 1646, 1647, 1648; 1656, 1657, 1658; 1666, 1667, 1668; 1676, 1677, 1678; 1686, 1687, 1688; 1696, 1697, 1698; 1706, 1707, 1708; 1716, 1717, 1718; 1726, 1727, 1728; 1736, 1737, 1738; 1746, 1747, 1748; 1756, 1757, 1758; 1766, 1767, 1768; 1776, 1777, 1778; 1786, 1787, 1788; 1796, 1797, 1798; 1806, 1807, 1808; 1816, 1817, 1818; 1826, 1827, 1828; 1836, 1837, 1838; 1846, 1847, 1848; 1856, 1857, 1858; 1866, 1867, 1868; 1876, 1877, 1878; 1886, 1887, 1888; 1896, 1897, 1898; 1906, 1907, 1908; 1916, 1917, 1918; 1926, 1927, 1928; or 1936, 1937, 1938; or CDRs in scFvs of SEQ ID NO; 2360; 2368; 2376; 2384; 2392; 2400; 2408; 2416; 2424; or 2432.

[0049] In another aspect, the anti-CD3 antibody or binding fragment thereof comprises: a heavy chain variable domain (VH) comprising complementarity determining regions CDR1 to CDR3, comprising the amino acid sequence triplets: 1941, 1942, 1943; 1946, 1947, 1948; 1951, 1952, 1953; 1956, 1957, 1958; 1961, 1962, 1963; 1966, 1967, 1968; 1971, 1972, 1973; 1976, 1977, 1978; 1981, 1982, 1983; 1986, 1987, 1988; 1991, 1992, 1993; 1996, 1997, 1998; 2001, 2002, 2003; 2006, 2007, 2008; 2011, 2012, 2013; 2016, 2017, 2018; 2021, 2022, 2023; 2026, 2027, 2028; 2031, 2032, 2033; 2036, 2037, 2038; 2041, 2042, 2043; 2046, 2047, 2048; 2051, 2052, 2053; 2056, 2057, 2058; 2061, 2062, 2063; 2066, 2067, 2068; 2071, 2072, 2073; 2076, 2077, 2078; 2081, 2082, 2083; 2086, 2087, 2088; 2091, 2092, 2093; 2096, 2097, 2098; 2101, 2102, 2103; 2106, 2107, 2108; 2111, 2112, 2113; 2116, 2117, 2118; 2121, 2122, 2123; 2126, 2127, 2128; 2131, 2132, 2133; 2136, 2137, 2138; 2141, 2142, 2143; 2146, 2147, 2148; 2151, 2152, 2153; 2156, 2157, 2158; 2161, 2162, 2163; 2166, 2167, 2168; 2171, 2172, 2173; 2176, 2177, 2178; 2181, 2182, 2183; or 2186, 2187, 2188; and a light chain variable domain (VL) comprising complementarity determining regions CDR1 to CDR3, comprising the amino acid sequence triplets: 2191, 2192, 2193; 2196, 2197, 2198; 2201, 2202, 2203; 2206, 2207, 2208; 2211, 2212, 2213; 2216, 2217, 2218; 2221, 2222, 2223; 2226, 2227, 2228; 2231, 2232, 2233; 2236, 2237, 2238; 2241, 2242, 2243; 2246, 2247, 2248; 2251, 2252, 2253; 2256, 2257, 2258; 2261, 2262, 2263; 2266, 2267, 2268; 2271, 2272, 2273; 2276, 2277, 2278; 2281, 2282, 2283; 2286, 2287, 2288; 2291, 2292, 2293; 2296, 2297, 2298; 2301, 2302, 2303; 2306, 2307, 2308; 2311, 2312, 2313; 2316, 2317, 2318; 2321, 2322, 2323; 2326, 2327, 2328; 2331, 2332, 2333; or 2336, 2337, 2338 or 2336, 2337, 2338; 2360; 2368; 2376; 2384; 2392; 2400; 2408; 2416; 2424; or 2432. In another aspect, the antigen or a tumor associated antigen is selected from 4-1BBL, AFP, AKAP-4, ALK, androgen receptor, bcr-abl, C1orf186, CA-125, CA6, CA6, CA19-9, CAMPATH-1, Carbonic anhydrase IX, carcinoembryonic antigen (CEA), CCR8, CDI, CD2, CD3, CD4, CD5, CD8, CD16A, CD19, CD1A, CD20, CD204, CD204, CD204, CD206, CD206, CD206, CD25, CD276, CD28, CD30, CD301, CD301, CD32A, CD32B, CD33, CD36, CD37, CD39, CD40, CD45, CD47, CD5, CD64, CD73, CEA, CLEC4C, CLDN16, CLDN6, CLDN18.2, CLEC10A, CLEC12A, CLEC5A, CLEC9A, CMET, CTCFL, cyclin B1, CYP1B1, DC-SIGN, DEC-205, Dectin1, Dectin2, DLL3, EGFR, EGFRVIII, Endoglin, endosialin, EPCAM, EphA2, epidermal growth factor, ERG, ETV6-AML, ferritin, fibroblast activation protein (FAP), FLT3, folate-binding protein, Fos-related antigen 1, FRA, fucosyl GM1, G250, GD2, GD3, Glycoprotein A33, GloboH, GLP-3, GM2, GM3, gp100, HER2, HER2/neu, HER3, HLD-DR, HMWMAA, HPV E6, HPV E7, hTERT, HVEM, IL-2 receptor, IV1, Latent-TGFB, LCK, Legumain, Ley, LIV1, LMP2, LY6E, MAD-CT-1, MAD-CT-2, MAGE AI, MAGE A3, mannose scavenger receptor1, MARCO, MelanA/MARTI, mesothelin (MSLN), metalloproteinase, ML-IAP, MSLN, MUC1, MUC15, MUC16, MYCN, myostatin, NA17, NAPI2B, NAPI2B, NY-BR-1, NY-ESO-1, OX40L, OY-TES1, p185HER2, P53 mutant, P53 nonmutant, PAGE4, PAP, PAX3, PAX5, PDGFR-B, PDL, PDL1, PLAV1, polysialic acid, PRI, PSA, PSCA, PSMA, PTK7, Ras mutant, RGS5, RhoC, RON, ROR1, ROR2, RRC15, SART3, SIRPA, Sperm protein 17, SSX2, STn, survivin, TAG-72, tenascin, TGFB, Tic 3, TMEM238, TMPRSS3, TMPRSS4, Tn, TRA6, TROP2, TRP-2, tyrosinase, UPK1B, vascular endothelial growth factor, VEGFR, VEGFR2, VISTA, VTCN1, WT1, XAGE 1, or Y6E. In another aspect, the bispecific, modulatable T cell engaging antibody or antigen binding fragments has a binding or activation that differs from the following antibodies; ABT806 (EGFRvIII), adecatumumab (EPCAM), alemtuzumab (CD33), AMG595 (EGFRvIII), anctumab (MSLN), anti-ACE2, anti-EphA2 (EphA2), anti-hyaluronidase, anti-neuraminidase, anti-NY-ESO-1, anti-PTK7 (PTK7), cetuximab (EGFR), cirmtuzumab (ROR1), clivatuzumab (MUC1), CT-011 (PD1), DS-8895a variant 1 (EphA2), DS-8895a variant 2 (EphA2), durvalumab (PDL1) anti-MAGE-A3, edrecolomab (EPCAM), farletuzumab (FRA/folate receptor alpha), Gemtuzumab ozogamicin (CD33), huDS6 (CA6), humanized Ab 2-3 (CEA), humanized PR1A3 (CEA), ibritumomab tiuxetan (CD52), IMAB362/claudiximab (Claudin 18,2), ipilimumab (CTLA4), J591 variant 1 (PSMA), J591 variant 2 (PSMA), ladiratuzumab (LIV1), lifastuzumab (NAPI2B), MEDI-547 (EphA2), mirvetuximab (FRA), narnatumab (RON), nimotuzumab (EGFR), nivolumab (PD1), onartuzumab (c-MET), panitumumab (EGFR), patritumab (HER3), pembrolizumab (PD1), pertuzumab (HER2/neu), PF-06647020 (PTK7), RG7841 (LY6E), rituximab (CD20), rovalpituzumab (DLL3), sacituzumab (TROP2), sibrotuzumab (FAP), sofituzumab (MUC16), tositumomab (CD20), trastuzumab (HER2/neu), tremelimumab (CP-675,206) (CTLA4), zalutumumab (EGFR), or bispecific antibody or antigen binding fragments thereof.

### BRIEF DESCRIPTION OF THE DRAWINGS

[0050] The patent or application file contains at least one drawing executed in color. Copies of this patent or patent application publication with color drawing(s) will be provided by the Office upon request and payment of the necessary fee. The present application can be understood by reference to the following description taken in conjunction with the accompanying figures.

[0051] FIGS. 1A and 1B illustrate the two paths to anti-CD3 specific antibody discovery by engineered-epitope immunization and screening or by StableHu optimizer, the antibodies are screened for binding and T cell activation.

[0052] FIG. 2 shows the engineered epitopes steered immunization to three CD3 repertoires that were cloned and screened by phage display, followed by multimodal screening with mammalian display.

[0053] FIG. 3 shows the EngageTx method in which anti-CD3 antibodies are selected for diversity of T cell binding and activation.

[0054] For example, 68 prioritized clones are selected, with a >1000×T cell binding range, capable of T cell activation with >800× activation, then 10 clones were selected, in this example, to create MUC16 and TROP-2 bispecifics. Then the bispecifics were tested on OVCAR-1 cells with primary human peripheral blood mononuclear cells (PBMCs).

[0055] FIG. 4 are graphs that show epitope-steered immunization and StableHu generated CD3 bispecific antibodies of nine anti-CD3 clones in a bispecific against MUC16 that are shown to generate a 1000× range of activity. The activity of the bispecific antibodies are shown for T cell killing, CD8 T cell activation, interferon-gamma secretion and tumor necrosis factor-alpha secretion.

[0056] FIG. 5 are graphs that show epitope-steered immunization and StableHu generated CD3 bispecific antibodies of nine anti-CD3 clones in a bispecific against TROP-2 that are shown to generate a 1000× range of activity. The activity of the bispecific antibodies is shown for T cell killing, CD8 T cell activation, interferon-gamma secretion and tumor necrosis factor-alpha secretion.

[0057] FIG. 6 shows that different tumor antigen binders require different CD3 arms. The activity of the bispecific antibodies is shown for T cell killing, CD8 T cell activation, interferon-gamma secretion and tumor necrosis factor-alpha secretion. It is shown that the CD3 Arm 1 created active TROP-2 but not an active MUC16 bispecific.

[0058] FIG. 7 shows that different tumor antigen binders require different CD3 arms. The activity of the bispecific antibodies is shown for T cell killing, CD8 T cell activation, interferon-gamma secretion and tumor necrosis factor-alpha secretion. It is shown that the CD3 Arm 2 created active MUC16 but not an active TROP-2 bispecific.

[0059] FIG. 8 shows that bispecific mammalian display enabled whole molecule optimization.

### DETAILED DESCRIPTION OF THE INVENTION

[0060] While the making and using of various embodiments of the present invention are discussed in detail below, it should be appreciated that the present invention provides many applicable inventive concepts that can be embodied in a wide variety of specific contexts. The specific embodiments discussed herein are merely illustrative of specific ways to make and use the invention and do not delimit the scope of the invention.

[0061] To facilitate the understanding of this invention, a number of terms are defined below. Terms defined herein have meanings as commonly understood by a person of ordinary skill in the areas relevant to the present invention. Terms such as “a”, “an” and “the” are not intended to refer to only a singular entity, but include the general class of which a specific example may be used for illustration. The terminology herein is used to describe specific embodiments of the invention, but their usage does not delimit the invention, except as outlined in the claims.

[0062] It should be understood that, unless clearly indicated, in any method described or disclosed herein that includes more than one act, the order of the acts is not necessarily limited to the order in which the acts of the method are recited, but the disclosure encompasses exemplary embodiments in which the order of the acts is so limited.

[0063] As used herein, the term “antibody” refers to an intact antibody or a binding fragment thereof that binds specifically to a target antigen. Binding fragments are produced by recombinant DNA techniques, or by enzymatic or chemical cleavage of intact antibodies. Binding fragments include Fab, Fab′, F(ab)2, Fv, and single-chain variable fragment (scFv) antibodies. An antibody substantially inhibits adhesion of a receptor to a counterreceptor when an excess of antibody reduces the quantity of receptor bound to counterreceptor by at least about 20%, 40%, 60% or 80%, and more usually greater than about 85% (as measured in an in vitro competitive binding assay). The term “antibody” is used in the broadest sense, and specifically covers monoclonal antibodies (including full-length antibodies or other bivalent, Fc-region containing antibodies such as bivalent scFv Fc-fusion antibodies), polyclonal antibodies, multispecific antibodies (e.g., bispecific antibodies), and antibody fragments (e.g., Fab, Fab′, F(ab)2, Fv, scFv) so long as they exhibit the desired biological activity. Antibodies (Abs) and immunoglobulins (Igs) are glycoproteins having the same structural characteristics. The present invention includes monoclonal antibodies (and binding fragments thereof) that are completely recombinant, in other words, where the complementarity determining regions (CDRs) are genetically spliced into a human antibody backbone, often referred to as veneering an antibody. Thus, in certain aspects, the monoclonal antibody is a fully synthesized antibody. In certain embodiments, the monoclonal antibodies (and binding fragments thereof) can be made in bacterial or eukaryotic cells, including plant cells.

[0064] As used herein, the term “antibody fragment” refers to a portion of a full-length antibody, generally the antigen-binding or variable region, and include Fab, Fab′, F(ab)2, Fv, and scFv fragments. Papain digestion of antibodies produces two identical antigen-binding fragments, called the Fab fragment, each with a single antigen-binding site, and a residual “Fc” fragment, so-called for its ability to crystallize readily. Pepsin treatment yields an F(ab)2 fragment that has two antigen-binding fragments which are capable of cross-linking antigen, and a residual other fragment (which is termed pFc). As used herein, “functional fragment” with respect to antibodies, refers to Fv,F(ab) and F(ab)2 fragments. As used herein, the “Fv” fragment is the minimum antibody fragment that contains a complete antigen recognition and binding site. This region consists of a dimer of one heavy and one light chain variable domain in a tight, non-covalent association (VH-VL dimer). It is in this configuration that the three CDRs of each variable domain interact to define an antigen-binding site on the surface of the VH-VL dimer. Collectively, the six CDRs confer antigen-binding specificity to the antibody. However, even a single variable domain (or half of an Fv comprising only three CDRs specific for an antigen) has the ability to recognize and bind antigen, although at a lower affinity than the entire binding site.

[0065] In some embodiments, bispecific or multispecific antibodies are provided, which comprise at least a heavy chain variable region from the antibody family of the invention and may comprise a heavy and light chain variable region provided herein. Bispecific antibodies comprise at least the heavy chain variable region of an antibody specific for a protein other than CD3, and may comprise a heavy and light chain variable region. In some such embodiments, the second antibody specificity binds to a tumor associated antigen, a targeting antigen, e.g., integrins, etc., a pathogen antigen, a checkpoint protein, and the like. Various formats of bispecific antibodies are within the scope of the invention, including without limitation single chain polypeptides, two chain polypeptides, three chain polypeptides, four chain polypeptides, and multiples thereof.

[0066] The Fab fragment, also designated asF(ab), also contains the constant domain of the light chain and the first constant domain (CH1) of the heavy chain. Fab fragments differ from Fab fragments by the addition of a few residues at the carboxyl terminus of the heavy chain CHI domain including one or more cysteines from the antibody hinge region. Fab-SH is the designation herein for Fab′ in which the cysteine residue(s) of the constant domains have a free thiol group.F(ab) fragments are produced by cleavage of the disulfide bond at the hinge cysteines of the F(ab)2 pepsin digestion product. Additional chemical couplings of antibody fragments are known to those of ordinary skill in the art.

[0067] Native antibodies and immunoglobulins are usually heterotetrameric glycoproteins of about 150,000 daltons, composed of two identical light (L) chains and two identical heavy (H) chains. Each light chain is linked to a heavy chain by at least one covalent disulfide bond, however, the number of disulfide linkages varies between the heavy chains of different immunoglobulin isotypes. Each heavy and light chain also has regularly spaced intrachain disulfide bridges. Each heavy chain has at one end a variable domain (VH) followed by the constant domains. Each light chain has a variable domain at one end (VL) and a constant domain at its other end. The constant domain of the light chain is aligned with the first constant domain of the heavy chain, and the light chain variable domain is aligned with the variable domain of the heavy chain. Particular amino acid residues form an interface between the light and heavy chain variable domains (Clothia et al., J. Mol. Biol. 186, 651-66, 1985); Novotny and Haber, Proc. Natl. Acad. Sci. USA 82 4592-4596 (1985), relevant portions incorporated herein by reference.

[0068] As used herein, an “isolated” antibody is one that has been identified and separated and/or recovered from a component of the environment in which it was produced. Contaminant components of its production environment are materials, which would interfere with diagnostic or therapeutic uses for the antibody, and may include enzymes, hormones, and other proteinaceous or nonproteinaceous solutes. In certain embodiments, the antibody will be purified as measurable by at least three different methods: 1) to greater than 50% by weight of antibody as determined by the Lowry method, such as more than 75% by weight, or more than 85% by weight, or more than 95% by weight, or more than 99% by weight: 2) to a degree sufficient to obtain at least 10 residues of N-terminal or internal amino acid sequence by use of a spinning cup sequenator, such as at least 15 residues of sequence; or 3) to homogeneity by SDS-PAGE under reducing or non-reducing conditions using Coomasie blue or, preferably, silver stain. Isolated antibody includes the antibody in situ within recombinant cells since at least one component of the antibody's natural environment will not be present. Ordinarily, however, isolated antibody will be prepared by at least one purification step.

[0069] As used herein, the terms “antibody mutant” or “antibody variant” refer to an amino acid sequence variant of an antibody wherein one or more of the amino acid residues have been modified. Such mutants necessarily have less than 100% sequence identity or similarity with the amino acid sequence having at least 75% amino acid sequence identity or similarity with the amino acid sequence of either the heavy or light chain variable domain of the antibody, such as at least 80%, or at least 85%, or at least 90%, or at least 95, 96, 97, 98, or 99%.

[0070] As used herein, the term “variable” in the context of the variable domain of antibodies, refers to the fact that certain portions of the variable domains differ extensively in sequence among antibodies and are used in the binding and specificity of each particular antibody for its particular antigen. However, the variability is not evenly distributed through the variable domains of antibodies. It is concentrated in three segments called complementarity determining regions (CDRs) also known as hypervariable regions both in the light chain and the heavy chain variable domains. There are at least two techniques for determining CDRs: (1) an approach based on cross-species sequence variability (i.e., Kabat et al., Sequences of Proteins of Immunological Interest (National Institute of Health, Bethesda, Md. 1987); and (2) an approach based on crystallographic studies of antigen-antibody complexes (Chothia. C. et al. (1989). Nature 342:877), or both, that is Chothia plus Kabat. The more highly conserved portions of variable domains are called the framework (FR). The variable domains of native heavy and light chains each comprise four FR regions, largely adopting a β-sheet configuration, connected by three CDRs, which form loops connecting, and in some cases forming part of, the β-sheet structure. The CDRs in each chain are held together in close proximity by the FR regions and, with the CDRs from the other chain, contribute to the formation of the antigen-binding site of antibodies (see Kabat et al.) The constant domains are not involved directly in binding an antibody to its cognate antigen but exhibit various effector function, such as participation of the antibody in antibody-dependent cellular toxicity.

[0071] The light chains of antibodies (immunoglobulin) from any vertebrate species can be assigned to one of two clearly distinct types, called kappa and lambda, based on the amino sequences of their constant domain, Depending on the amino acid sequences of the constant domain of their heavy chains, “immunoglobulins” can be assigned to different classes, There are at least five (5) major classes of immunoglobulins: IgA, IgD, IgE, IgG, and IgM, and several of these may be further divided into subclasses (isotypes), e.g., IgG-1, IgG-2, IgG-3, and IgG4; IgA-1 and IgA-2. The subunit structures and three-dimensional configurations of different classes of immunoglobulins are well known.

[0072] As used herein, the term “monoclonal antibody” refers to an antibody obtained from a population of substantially homogeneous antibodies, i.e., the individual antibodies comprising the population are identical except for possible naturally occurring mutations that may be present in minor amounts. Monoclonal antibodies are highly specific, being directed against a single antigenic site. Furthermore, in contrast to conventional (polyclonal) antibody preparations, which typically include different antibodies directed against different determinants (epitopes), each monoclonal antibody is directed against a single determinant on the antigen. In additional to their specificity, the monoclonal antibodies are advantageous in that they are synthesized by the hybridoma culture, uncontaminated by other immunoglobulins. The modifier “monoclonal” indicates the character of the antibody as being obtained from a substantially homogeneous population of antibodies, and is not to be construed as requiring production of the antibody by any particular method. For example, the monoclonal antibodies to be used in accordance with the presently disclosed and claimed invention may be made by the hybridoma method first described by Kohler and Milstein, Nature 256, 495 (1975), relevant portions incorporated herein by reference.

[0073] All monoclonal antibodies used in accordance with the presently disclosed and claimed invention will be either (1) the result of a deliberate immunization protocol, as described in more detail hereinbelow; or (2) the result of an immune response that results in the production of antibodies naturally in the course of a disease or cancer.

[0074] As used herein, the term “binding affinity” refers to the strength of the sum total of noncovalent interactions between a single binding site of a molecule (e.g., an antibody or other binding molecule) and its binding partner (e.g., an antigen or receptor). The affinity of a molecule X for its partner Y can generally be represented by the dissociation constant (Kd). Affinity can be measured by common methods known in the art, including those described herein. Low-affinity antibodies bind antigen (or receptor) weakly and tend to dissociate readily, whereas high-affinity antibodies bind antigen (or receptor) more tightly and remain bound longer. In the case of antibodies, the antigen binding site binds to its cognate epitope.

[0075] As used herein, the terms “cancer,” “neoplasm,” and “tumor” are used interchangeably to refer to cells that exhibit autonomous, unregulated growth, such that they exhibit an aberrant growth phenotype characterized by a significant loss of control over cell proliferation. Cells of interest for detection, analysis, or treatment in the present application include precancerous (e.g., benign), malignant, pre-metastatic, metastatic, and non-metastatic cells. Cancers of virtually every tissue are known. As used herein, the phrase “cancer burden” refers to the number of cancer cells or cancer volume in a subject. Reducing a cancer burden refers to reducing the number of cancer cells or the cancer volume in a subject. As used herein, the term “cancer cell” refers to any cell that is a cancer cell or is derived from a cancer cell, e.g., a clone of a cancer cell. Many types of cancers are known to those of skill in the art, including solid tumors such as carcinomas, sarcomas, glioblastomas, melanomas, lymphomas, myelomas, etc., and circulating cancers such as leukemias, including specifically B cell leukemias, T cell leukemias, etc. Examples of cancer that may be treated with the bispecific, modulatable antibody or fragments thereof include but are not limited to, ovarian cancer, breast cancer, colon cancer, lung cancer, prostate cancer, hepatocellular cancer, gastric cancer, pancreatic cancer, cervical cancer, ovarian cancer, liver cancer, bladder cancer, cancer of the urinary tract, thyroid cancer, renal cancer, carcinoma, melanoma, head and neck cancer, and brain cancer.

[0076] The uses of the monoclonal antibodies of the presently disclosed and claimed invention may require administration of such or similar monoclonal antibody to a subject, such as a human. However, when the monoclonal antibodies are produced in a non-human animal, such as a rodent or chicken, administration of such antibodies to a human patient will normally elicit an immune response, wherein the immune response is directed towards the antibodies themselves. Such reactions limit the duration and effectiveness of such a therapy. In order to overcome such problem, the monoclonal antibodies of the presently disclosed and claimed invention can be “humanized”, that is, the antibodies are engineered such that antigenic portions thereof are removed and like portions of a human antibody are substituted therefore, while the antibodies affinity for the CD3 and the target antigen is retained. This engineering may only involve a few amino acids, or may include entire framework regions of the antibody, leaving only the complementarity determining regions of the antibody intact. Several methods of humanizing antibodies are known in the art and are disclosed in U.S. Pat. No. 6,180,370, issued to Queen et al on Jan. 30, 2001; U.S. Pat. No. 6,054,927, issued to Brickell on Apr. 25, 2000; U.S. Pat. No. 5,869,619, issued to Studnicka on Feb. 9, 1999; U.S. Pat. No. 5,861,155, issued to Lin on Jan. 19, 1999; U.S. Pat. No. 5,712,120, issued to Rodriquez et al on Jan. 27, 1998; and U.S. Pat. No. 4,816,567, issued to Cabilly et al on Mar. 28, 1989, relevant portions incorporated herein by reference.

[0077] Humanized forms of antibodies are chimeric immunoglobulins, immunoglobulin chains or fragments thereof (such as Fab, Fab′, F(ab)2, Fv, scFv or other antigen-binding subsequences of antibodies) that are principally comprised of the sequence of a human immunoglobulin, and contain minimal sequence derived from a non-human immunoglobulin. Humanization can be performed following the method of Winter and co-workers (Jones et al., 1986; Riechmann et al., 1988; Verhoeven et al., 1988), by substituting nonhuman (i.e., rodent, chicken) CDRs or CDR sequences for the corresponding sequences of a human antibody, see, e.g., U.S. Pat. No. 5,225,539. In some instances. Fv framework residues of the human immunoglobulin are replaced by corresponding non-human residues from the donor antibody. Humanized antibodies can also comprise residues that are found neither in the recipient antibody nor in the imported CDR or framework sequences. In general, the humanized antibody will comprise substantially all of, at least one, and typically two, variable domains, in which all or substantially all of the CDR regions correspond to those of a non-human immunoglobulin and all or substantially all of the framework regions are those of a human immunoglobulin consensus sequence. The humanized antibody optimally also will comprise at least a portion of an immunoglobulin constant region (Fc), typically that of a human immunoglobulin.

[0078] As used herein, the term “chimeric” antibody refers to a portion of the heavy and/or light chain that is identical with or homologous to corresponding sequences in antibodies derived from a particular species or belonging to a particular antibody class or subclass, while the remainder of the chain(s) is identical with or homologous to corresponding sequences in antibodies derived from another species or belonging to another antibody class or subclass, as well as fragments of such antibodies, so long as they exhibit the desired biological activity. A chimeric antibody will have two distinct antigen binding sites, which may be against the same or different antigens.

[0079] Antibody fragments of the disclosure retain anti-CD3 antigen binding specificity and binding to the target antigen. Antibody fragments include antigen-binding fragments (Fab), variable fragments (Fv) containing VH and VL sequences, single chain variable fragments (scFv) containing VH and VL sequences linked together in one chain, single chain antibody fragments (scAb) or other antibody variable region fragments, such as retaining antigen binding specificity.

[0080] As used herein, a “subject” may be a mammalian subject. Mammalian subjects include, humans, non-human primates, rodents, (e.g., rats, mice), lagomorphs (e.g., rabbits), ungulates (e.g., cows, sheep, pigs, horses, goats, and the like), etc. In some embodiments, the subject is a human. In some embodiments, the subject is a non-human primate, for example a cynomolgus monkey. In some embodiments, the subject is a companion animal (e.g., cats, dogs).

[0081] The presently disclosed and claimed invention further includes the use of fully human monoclonal antibodies cross-reactive against CD3 and the target antigen. Fully human antibodies essentially relate to antibody molecules in which the entire sequence of both the light chain and the heavy chain, including the CDRs, arise from human genes. Such antibodies are termed “human antibodies” or “fully human antibodies” herein. Human monoclonal antibodies can be prepared by, e.g., the trioma technique; the human B-cell hybridoma technique (see Kozbor, et al., Hybridoma, 2:7 (1983)) and the EBV hybridoma technique to produce human monoclonal antibodies (see Cole, et al., PNAS 82:859 (1985)), or as taught herein. Human monoclonal antibodies may be utilized in the practice of the presently disclosed and claimed invention and may be produced by using human hybridomas (see Cote, et al., PNAS 80:2026 (1983)) or by transforming human B-cells with Epstein Barr Virus in vitro (see Cole, et al., 1985), relevant portions incorporated herein by reference.

[0082] In addition, human antibodies can be made by introducing human immunoglobulin loci into transgenic animals, e.g., mice in which the endogenous immunoglobulin genes have been partially or completely inactivated. Upon challenge, human antibody production is observed, which closely resembles that seen in humans in all respects, including gene rearrangement, assembly, and antibody repertoire. This approach is described, for example but not by way of limitation, in U.S. Pat. Nos. 5,545,807; 5,545,806; 5,569,825; 5,625,126; 5,633,425; 5,661,016, and in Marks et al., J Biol. Chem. 267:16007, (1992); Lonberg et al., Nature, 368:856 (1994); Morrison, 1994; Fishwild et al., Nature Biotechnol. 14:845 (1996); Neuberger, Nat. Biotechnol. 14:826 (1996); and Lonberg and Huszar, Int Rev Immunol. 13:65 (1995), relevant portions incorporated herein by reference.

[0083] A method for producing an antibody of interest, such as a human antibody, is disclosed in U.S. Pat. No. 5,916,771, issued to Hori et al. on Jun. 29, 1999, and incorporated herein by reference. It includes introducing an expression vector that contains a nucleotide sequence encoding a heavy chain into one mammalian host cell in culture, introducing an expression vector containing a nucleotide sequence encoding a light chain into another mammalian host cell, and fusing the two cells to form a hybrid cell. The hybrid cell expresses an antibody containing the heavy chain and the light chain.

[0084] Non-limiting examples of antigens that are the targets of the antibody include, e.g., 4-1BBL, AFP, AKAP-4, ALK, androgen receptor, bcr-abl, C1orf186, CA-125, CA6, CA6, CA19-9, CAMPATH-1, Carbonic anhydrase IX, carcinoembryonic antigen (CEA), CCR8, CD1, CD2, CD3, CD4, CD5, CD8, CD16A, CD19, CD1A, CD20, CD204, CD204, CD204, CD206, CD206, CD206, CD25, CD276, CD28, CD30, CD301, CD301, CD32A, CD32B, CD33, CD36, CD37, CD39, CD40, CD45, CD47, CD5, CD64, CD73, CEA, CLEC4C, CLDN16, CLDN6, CLDN18.2, CLEC10A, CLEC12A, CLEC5A, CLEC9A, CMET, CTCFL, cyclin B1, CYP1B1, DC-SIGN, DEC-205, Dectin1, Dectin2, DLL3, EGFR, EGFRvIII, Endoglin, endosialin, EPCAM, EphA2, epidermal growth factor, ERG, ETV6-AML, ferritin, fibroblast activation protein (FAP), FLT3, folate-binding protein, Fos-related antigen 1, FRA, fucosyl GM1, G250, GD2, GD3, Glycoprotein A33, GloboH, GLP-3, GM2, GM3, gp100, HER2, HER2/neu, HER3, HLD-DR, HMWMAA, HPV E6, HPV E7, hTERT, HVEM, IL-2 receptor, IV1, Latent-TGFB, LCK, Legumain, Ley, LIV1, LMP2, LY6E, MAD-CT-1, MAD-CT-2, MAGE A1, MAGE A3, mannose scavenger receptor1, MARCO, MelanA/MART1, mesothelin (MSLN), metalloproteinase, ML-IAP, MSLN, MUC1, MUC15, MUC16, myostatin, MYCN, NA17, NAPI2B, NAPI2B, NY-BR-1, NY-ESO-1, OX40L, OY-TES1, p185HER2, P53 mutant, P53 nonmutant, PAGE4, PAP, PAX3, PAX5, PDGFR-B, PDL, PDL1, PLAV1, polysialic acid, PR1, PSA, PSCA, PSMA, PTK7, Ras mutant, RGS5, RhoC, RON, ROR1, ROR2, RRC15, SART3, SIRPA, Sperm protein 17, SSX2, STn, survivin, TAG-72, tenascin, TGFB, Tie 3, TMEM238, TMPRSS3, TMPRSS4, Tn, TRA6, TROP2, TRP-2, tyrosinase, UPK1B, vascular endothelial growth factor, VEGFR, VEGFR2, VISTA, VTCN1, WT1, XAGE 1, or Y6E. The nucleic and amino acid sequences for each of these is available from www.genecards.com, relevant nucleic and amino acid sequences incorporated herein by reference.

[0085] Non-limiting examples of antibodies that can be modified to include the conditional masks of the present invention include, e.g., ABT806 (EGFRvIII), adecatumumab (EPCAM), alemtuzumab (CD33), AMG595 (EGFRvIII), anetumab (MSLN), anti-ACE2, anti-EphA2 (EphA2), anti-hyaluronidase, anti-neuraminidase, anti-NY-ESO-1, anti-PTK7 (PTK7), cetuximab (EGFR), cirmtuzumab (ROR1), clivatuzumab (MUC1), CT-011 (PD1), DS-8895a variant 1 (EphA2), DS-8895a variant 2 (EphA2), durvalumab (PDL1) anti-MAGE-A3, edrecolomab (EPCAM), farletuzumab (FRA/folate receptor alpha), gemtuzumab ozogamicin (CD33), huDS6 (CA6), humanized Ab 2-3 (CEA), humanized PR1A3 (CEA), ibritumomab tiuxetan (CD52), IMAB362/claudiximab (Claudin18.2), ipilimumab (CTLA4), J591 variant 1 (PSMA), J591 variant 2 (PSMA), ladiratuzumab (LIV1), lifastuzumab (NAPI2B), MEDI-547 (EphA2), mirvetuximab (FRA), narnatumab (RON), nimotuzumab (EGFR), nivolumab (PD1), onartuzumab (c-MET), panitumumab (EGFR), patritumab (HER3), pembrolizumab (PD1), pertuzumab (HER2/neu), PF-06647020 (PTK7), RG7841 (LY6E), rituximab (CD20), rovalpituzumab (DLL3), sacituzumab (TROP2), sibrotuzumab (FAP), sofituzumab (MUC16), tositumomab (CD20), trastuzumab (HER2/neu), tremelimumab (CP-675,206)(CTLA4), or zalutumumab (EGFR).

[0086] Non-limiting examples of protease cleavage sites for use in the linker, when the linker is a peptide, are those that are cleaved by, e.g., actinidain, activated protein C, ADAM10, ADAM12, ADAMS, bromelain, bromelain, calpain, Caspase, caspase-3, Cathepsin, Cathepsin B, Cathepsin C, Cathepsin D, Cathepsin E, cathepsin G, Cathepsin K, Cathepsin L, Chymase, chymosin, chymotrypsin-like protease, CMV protease, collagenase, DESC1, dipeptidyl peptidase, dipeptidyl peptidase IV (DPPIV/CD26), disintegrin and metalloproteinase (ADAM), DPP-4, Elastase, elastase-like protease, enterokinase, Factor Xa, FAP, FAP (FAP-α), Granzyme B, Guanidinobenzotase, Hepsin, HIV-1 protease, hK1, hK15, hK3, HSV protease, HtrA1, HumNeutrophil Elastase, interleukin-1l converting enzyme, kallikrein, kallikrein-related peptidase (KLK), Lactoferrin, legumain, Marapsin, mast cell chymase, mast cell tryptase, matriptase, Matriptase-2, matrix metalloprotease (MMP), metalloendopeptidase, metalloexopeptidase, Mir1-CP, metalloproteases (MMP1, MMP2, MMP3, MMP7, MMP8, MMP9, MMP10, MMP11, MMP12, MMP13, MMP14), nepenthesin, neutrophil elastase, neutrophil serine protease 4, NS3/4A, PACE4, papain, pepsin, plasmepsin, plasmin, prostate-specific antigen (PSA), proteinase 3, renin, secretase, stromelysin, subtilisin-like protease, thrombin, tissue plasminogen activator (tPA), transmembrane Serine Protease (TMPRSS), trypsin, trypsin-like protease, tryptase, type II transmembrane serine protease (TTSP), Type IV collagenase, urokinase plasminogen activator (uPA), or urokinase plasminogen activator receptor (uPAR). The nucleic and amino acid sequences for each of these is available from web.expasy.org/peptide_cutter/, relevant nucleic and amino acid sequences incorporated herein by reference.

[0087] Non-amino acid cleavage polymers or linkers can include, e.g., nucleic acids, lipids, carbohydrates, or chemical linkers, such as those that are cleaved or dissociated by, e.g., light, radiation, electromagnetic, pH, chemically, or enzymatically.

[0088] Structural-switch linkers can include amino acid or non-amino acid polymers that adopt an inactivated prodrug conformation with the mask blocking the antibody-antigen binding site. Upon exposure to specific microenvironment conditions such as pH, enzyme(s), or metabolite(s)—the linker switches to the activated antibody conformation where the mask no longer blocks antibody-antigen binding.

[0089] As used herein, the term “vector” refers to a nucleic acid molecule capable of transporting another nucleic acid to which it has been linked. One type of vector is a “plasmid”, which refers to a circular double-stranded DNA into which additional DNA segments are inserted. Another type of vector is a viral vector in which DNA segments are inserted into a viral genome. Certain vectors are capable of autonomous replication in a host cell into which they are introduced (e.g., bacterial vectors having a bacterial and an episomal origin of replication, or non-episomal mammalian vectors can be integrated into the genome of a host cell upon introduction into the host cell, and thereby are replicated along with the host genome. Certain vectors are capable of directing the expression of genes to which they are operably linked. Such vectors are referred to herein as “recombinant expression vectors” (or simply, “recombinant vectors”). Generally, expression vectors useful for expression in mammalian cells using recombinant DNA techniques are often in the form of plasmids.

[0090] As used herein, the term “host cell” or “recombinant host cell” refer to a cell that has been genetically altered, or is capable of being genetically altered by introduction of an exogenous polynucleotide, such as a recombinant plasmid or vector. A host cell refers not only to a particular subject cell but also to the progeny of such a host cell. Because certain modifications may occur in succeeding generations due to either mutation or environmental influences, such progeny may not, in fact, be identical to the parent cell, but are still included within the scope of the term host cell.

[0091] As used herein, the term “treatment” refers to both therapeutic treatment and prophylactic or preventative measures. Those in need of treatment include those already with the disease or disorder as well as those in which the disorder is to be prevented. The effect may be prophylactic in terms of completely or partially preventing a disease or symptom thereof and/or may be therapeutic in terms of a partial or complete cure for a disease and/or adverse effects attributable to the disease. A “treatment” refers to any treatment of a disease or disorder in a mammal and includes: (a) preventing the disease from occurring in a subject that may be predisposed to the disease but has not yet been diagnosed as having it; (b) relieving the disease, i.e., causing regression of the disease; or (c) inhibiting the disease, i.e., arresting its development. The therapeutic agent may be administered before, during, or after the onset of disease or injury. The treatment of ongoing disease, where the treatment stabilizes or reduces the undesirable clinical symptoms of the patient, is of particular interest. Such treatment is desirably performed prior to the complete loss of function in the affected tissues. The subject therapy may be administered during the symptomatic stage of the disease, and in some cases after the symptomatic stage of the disease. Treatment may be delivered prophylactically (prior to showing signs of an autoimmune disease or cancer) or therapeutically (following the presence of an autoimmune disease or cancer). In one aspect, the invention also includes using a first bispecific antibody or antigen binding fragment having a predetermined activity is used during a first phase of treatment, and a second bispecific antibody or antigen binding fragment having a different predetermined activity is used during a second phase of treatment, and optionally using one or more different bispecific antibody or antigen binding fragment having a predetermined activity is used during a first phase of treatment for any additional phases of treatment. In other words, a first bispecific antibody or antigen binding fragment having a first predetermined activity is used during a first phase of treatment, and a second bispecific antibody or antigen binding fragment having a second predetermined activity is used during a second phase of treatment, and optionally using one or more different bispecific antibody or antigen binding fragment having a different predetermined activity is used during a first phase of treatment for any additional phases of treatment.

[0092] As used herein, the term “disorder” refers to any condition that would benefit from treatment with the bispecific, modulatable antibody or fragments thereof. This includes chronic and acute disorders or diseases including those infectious or pathological conditions that predispose the mammal to the disorder in question.

[0093] An antibody or antibody fragment can be generated with an engineered sequence or glycosylation state to confer preferred levels of activity in antibody-dependent cellular cytotoxicity (ADCC), antibody-dependent cellular phagocytosis (ADCP), antibody-dependent neutrophil phagocytosis (ADNP), or antibody-dependent complement deposition (ADCD) functions as measured by bead-based or cell-based assays or in vivo studies in animal models.

[0094] Alternatively, or additionally, it may be useful to combine amino acid modifications with one or more further amino acid modifications that alter complement component C1q binding and/or the complement-dependent cytotoxicity (CDC) function of the Fc region of an IL-23p19 binding molecule. The binding polypeptide of particular interest may be one that binds to C1q and displays complement-dependent cytotoxicity. Polypeptides with pre-existing C1q binding activity, optionally further having the ability to mediate CDC may be modified such that one or both of these activities are enhanced. Amino acid modifications that alter C1q and/or modify its complement-dependent cytotoxicity function are described, for example, in W0/0042072, which is hereby incorporated by reference.

[0095] An Fc region of an antibody can be designed to alter the effector function, e.g., by modifying C1q binding and/or FcγR binding and thereby changing complement-dependent cytotoxicity (CDC) activity and/or antibody-dependent cell-mediated cytotoxicity (ADCC) activity. These “effector functions” are responsible for activating or diminishing a biological activity (e.g., in a subject). Examples of effector functions include, but are not limited to: C1q binding; CDC; Fc receptor binding; ADCC; phagocytosis; down-regulation of cell surface receptors (e.g., B cell receptor; BCR), etc. Such effector functions may require the Fc region to be combined with a binding domain (e.g., an antibody variable domain) and can be assessed using various assays (e.g., Fc binding assays, ADCC assays, CDC assays, etc.).

[0096] The Fc region can be a wild-type Fc region, a mutated Fc region, a monomeric wild-type Fc region, a monomeric mutant Fc region, a dimeric wild-type Fc region, or a dimeric mutant Fc region, a second variable heavy region and a second Fc region, or a second variable heavy region and a second Fc region, and may further include an uncleavable flexible linker and a second variable light region and a second heavy variable region, or a second Fc region and an uncleavable flexible linker and payload, such as a toxin, a cytokine, an anti-cancer agent, or another antibody.

[0097] Non-limiting examples of payload include, e.g., cytotoxic proteins or peptides include a bacterial cytotoxin such as an alpha-pore forming toxin (e.g., cytolysin A from E. coli), a beta-pore-forming toxin (e.g., α-Hemolysin, PVL-panton Valentine leukocidin, aerolysin, clostridial Epsilon-toxin, Clostridium perfringens enterotoxin), binary toxins (anthrax toxin, edema toxin, C. botulinum C2 toxin, C. spirofome toxin, C. perfringens iota toxin, C. difficile cyto-lethal toxins (A and B)), prion, parasporin, a cholesterol-dependent cytolysins (e.g., pneumolysin), a small pore-forming toxin (e.g., Gramicidin A), a cyanotoxin (e.g., microcystins, nodularins), a hemotoxin, a neurotoxin (e.g., botulinum neurotoxin), a cytotoxin, cholera toxin, diphtheria toxin, Pseudomonas exotoxin A, tetanus toxin, or an immunotoxin (idarubicin, ricin A, CRM9, Pokeweed antiviral protein, DT). Exemplary apoptotic triggering proteins or peptides include apoptotic protease activating factor-1 (Apaf-1), cytochrome-c, caspase initiator proteins (CASP2, CASP8, CASP9, CASP10), apoptosis inducing factor (AIF), p53, p73, p63, Bcl-2, Bax, granzyme B, poly-ADP ribose polymerase (PARP), and P 21-activated kinase 2 (PAK2).

[0098] The payload can also be a cytotoxic agent, such as doxorubicin (adriamycin), gemcitabine (gemzar), daunorubicin, procarbazine, mitomycin, cytarabine, etoposide, methotrexate, venorelbine, 5-fluorouracil (5-FU), vinca alkaloids such as vinblastine or vincristine; bleomycin, paclitaxel (taxol), docetaxel (taxotere), aldesleukin, asparaginase, busulfan, carboplatin, cladribine, camptothecin, CPT-11, 10-hydroxy-7-ethylcamptothecin (SN38), dacarbazine, S-I capecitabine, ftorafur, 5′deoxyfluorouridine, UFT, eniluracil, deoxycytidine, 5-azacytosine, 5-azadeoxycytosine, allopurinol, 2-chloroadenosine, trimetrexate, aminopterin, methylene-10-deazaminopterin (MDAM), oxaplatin, picoplatin, tetraplatin, satraplatin, platinum-DACH, ormaplatin, CI-973, JM-216, and analogs thereof, epirubicin, etoposide phosphate, 9-aminocamptothecin, 10,11-methylenedioxycamptothecin, karenitecin, 9-nitrocamptothecin, TAS 103, vindesine, L-phenylalanine mustard, ifosphamidemefosphamide, perfosfamide, trophosphamide carmustine, semustine, epothilones A-E, tomudex, 6-mercaptopurine, 6-thioguanine, amsacrine, etoposide phosphate, karenitecin, acyclovir, valacyclovir, ganciclovir, amantadine, rimantadine, lamivudine, zidovudine, bevacizumab, trastuzumab, rituximab, 5-Fluorouracil, and combinations thereof.

[0099] Non-limiting examples of cytokines include: growth hormone; parathyroid hormone; thyroxine; insulin; proinsulin; relaxin; prorelaxin; glycoprotein hormones; hepatic growth factor; fibroblast growth factor; prolactin; placental lactogen; TNF-α; mullerian-inhibiting substance; gonadotropin-associated peptide; inhibin; activin; vascular endothelial growth factor; integrin; thrombopoietin (TPO); nerve growth factors; platelet-growth factor; placental growth factor, transforming growth factors (TGFs); insulin-like growth factor −1 and −11; erythropoietin (EPO); osteoinductive factors; interferons; colony stimulating factors (CSFs); lymphotoxin-alpha; lymphotoxin-beta; CD27L; CD30L; FASL; 4-1 BBL; OX40L; TRAIL; IL-1; IL-2; IL-3; IL-4; IL-5; IL-6; IL-7; IL-8; IL-9; IL-10; IL-11; IL-12; IL-13; IL-15; IL-18; IL-21; IL-22; IL-23; IL-33; IFN-a; IFN-b; IFN-g; IFN-g inducing factor (IGIF); bone morphogenetic protein (BMP); leukemia inhibitory factor (LIF); or kit ligand (KL).

[0100] Non-limiting examples of anti-cancer drug include, e.g., dihydroxyvitamin D3, 4-ipomeanol, 5-ethynyluracil, 9-dihydrotaxol, abiraterone, acivicin, aclarubicin, acodazole hydrochloride, acronine, acylfiilvene, adecypenol, adozelesin, aldesleukin, all-tk antagonists, altretamine, ambamustine, ambomycin, ametantrone acetate, amidox, amifostine, aminoglutethimide, aminolevulinic acid, amrubicin, amsacrine, anagrelide, anastrozole, andrographolide, angiogenesis inhibitors, antagonist D, antagonist G, antarelix, anthramycin, anti-dorsalizdng morphogenetic protein-1, antiestrogen, antineoplaston, antisense oligonucleotides, aphidicolin glycinate, apoptosis gene modulators, apoptosis regulators, apurinic acid, ARA-CDP-DLPTBA, arginine deaminase, asparaginase, asperlin, asulacrine, atamestane, atrimustine, axinastatin 1, axinastatin 2, axinastatin 3, azacitidine, azasetron, azatoxin, azatyrosine, azetepa, azotomycin, baccatin III derivatives, balanol, batimastat, benzochlorins, benzodepa, benzoylstaurosporine, beta lactam derivatives, beta-alethine, betaclamycin B, betulinic acid, BFGF inhibitor, bicalutamide, bisantrene, bisantrene hydrochloride, bisazuidinylspermine, bisnafide, bisnafide dimesylate, bistratene A, bizelesin, bleomycin, bleomycin sulfate, BRC/ABL antagonists, breflate, brequinar sodium, bropirimine, budotitane, busulfan, buthionine sulfoximine, cactinomycin, calcipotriol, calphostin C, calusterone, camptothecin derivatives, canarypox IL-2, capecitabine, caraceraide, carbetimer, carboplatin, carboxamide-amino-triazole, carboxyamidotriazole, carest M3, carmustine, earn 700, cartilage derived inhibitor, carubicin hydrochloride, carzelesin, casein kinase inhibitors, castanospermine, cecropin B, cedefingol, cetrorelix, chlorambucil, chlorins, chloroquinoxaline sulfonamide, cicaprost, cirolemycin, cisplatin, cis-porphyrin, cladribine, clomifene analogs, clotrimazole, collismycin A, collismycin B, combretastatin A4, combretastatin analog, conagenin, crambescidin 816, crisnatol, crisnatol mesylate, cryptophycin 8, cryptophycin A derivatives, curacin A, cyclopentanthraquinones, cyclophosphamide, cycloplatam, cypemycin, cytarabine, cytarabine ocfosfate, cytolytic factor, cytostatin, dacarbazine, dacliximab, dactinomycin, daunorubicin hydrochloride, decitabine, dehydrodidemnin B, deslorelin, dexifosfamide, dexormaplatin, dexrazoxane, dexverapamil, dezaguanine, dezaguanine mesylate, diaziquone, didemnin B, didox, diethyhiorspermine, dihydro-5-azacytidine, dioxamycin, diphenyl spiromustine, docetaxel, docosanol, dolasetron, doxifluridine, doxorubicin, doxorubicin hydrochloride, droloxifene, droloxifene citrate, dromostanolone propionate, dronabinol, duazomycin, duocannycin SA, ebselen, ecomustine, edatrexate, edelfosine, edrecolomab, elfomithine, elfomithine hydrochloride, elemene, elsarnitrucin, emitefur, enloplatin, enpromate, epipropidine, epirubicin, epirubicin hydrochloride, epristeride, erbulozole, erythrocyte gene therapy vector system, esorubicin hydrochloride, estramustine, estramustine analog, estramustine phosphate sodium, estrogen agonists, estrogen antagonists, etanidazole, etoposide, etoposide phosphate, etoprine, exemestane, fadrozole, fadrozole hydrochloride, fazarabine, fenretinide, filgrastim, finasteride, flavopiridol, flezelastine, floxuridine, fluasterone, fludarabine, fludarabine phosphate, fluorodaunorunicin hydrochloride, fluorouracil, fluorocitabine, forfenimex, formestane, fosquidone, fostriecin, fostriecin sodium, fotemustine, gadolinium texaphyrin, gallium nitrate, galocitabine, ganirelix, gelatinase inhibitors, gemcitabine, gemcitabine hydrochloride, glutathione inhibitors, hepsulfam, heregulin, hexamethylene bisacetamide, hydroxyurea, hypericin, ibandronic acid, idarubicin, idarubicin hydrochloride, idoxifene, idramantone, ifosfamide, ihnofosine, ilomastat, imidazoacridones, imiquimod, immunostimulant peptides, insulin-like growth factor-1 receptor inhibitor, interferon agonists, interferon alpha-2A, interferon alpha-2B, interferon alpha-N1, interferon alpha-N3, interferon beta-IA, interferon gamma-IB, interferons, interleukins, iobenguane, iododoxorubicin, iproplatm, irinotecan, irinotecan hydrochloride, iroplact, irsogladine, isobengazole, isohomohalicondrin B, itasetron, jasplakinolide, kahalalide F, lamellarin-N triacetate, lanreotide, lanreotide acetate, leinamycin, lenograstim, lentinan sulfate, leptolstatin, letrozole, leukemia inhibiting factor, leukocyte alpha interferon, leuprolide acetate, leuprolide/estrogen/progesterone, leuprorelin, levamisole, liarozole, liarozole hydrochloride, linear polyamine analog, lipophilic disaccharide peptide, lipophilic platinum compounds, lissoclinamide, lobaplatin, lombricine, lometrexol, lometrexol sodium, lomustine, lonidamine, losoxantrone, losoxantrone hydrochloride, lovastatin, loxoribine, lurtotecan, lutetium texaphyrin lysofylline, lytic peptides, maitansine, mannostatin A, marimastat, masoprocol, maspin, matrilysin inhibitors, matrix metalloproteinase inhibitors, maytansine, mechlorethamine hydrochloride, megestrol acetate, melengestrol acetate, melphalan, menogaril, merbarone, mercaptopurine, meterelin, methioninase, methotrexate, methotrexate sodium, metoclopramide, metoprine, meturedepa, microalgal protein kinase C inhibitors, MIF inhibitor, mifepristone, miltefosine, mirimostim, mismatched double stranded RNA, mitindomide, mitocarcin, mitocromin, mitogillin, mitoguazone, mitolactol, mitomalcin, mitomycin, mitomycin analogs, mitonafide, mitosper, mitotane, mitotoxin fibroblast growth factor-saporin, mitoxantrone, mitoxantrone hydrochloride, mofarotene, molgramostim, monoclonal antibody, human chorionic gonadotrophin, monophosphoryl lipid a/myobacterium cell wall SK, mopidamol, multiple drug resistance gene inhibitor, multiple tumor suppressor 1-based therapy, mustard anticancer agent, mycaperoxide B, mycobacterial cell wall extract, mycophenolic acid, myriaporone, n-acetyldinaline, nafarelin, nagrestip, naloxone/pentazocine, napavin, naphterpin, nartograstim, nedaplatin, nemorubicin, neridronic acid, neutral endopeptidase, nilutamide, nisamycin, nitric oxide modulators, nitroxide antioxidant, nitrullyn, nocodazole, nogalamycin, n-substituted benzamides, 06-benzylguanine, octreotide, okicenone, oligonucleotides, onapristone, ondansetron, oracin, oral cytokine inducer, ormaplatin, osaterone, oxaliplatin, oxaunomycin, oxisuran, paclitaxel, paclitaxel analogs, paclitaxel derivatives, palauamine, palmitoylrhizoxin, pamidronic acid, panaxytriol, panomifene, parabactin, pazelliptine, pegaspargase, peldesine, peliomycin, pentamustine, pentosan polysulfate sodium, pentostatin, pentrozole, peplomycin sulfate, perflubron, perfosfamide, perillyl alcohol, phenazinomycin, phenylacetate, phosphatase inhibitors, picibanil, pilocarpine hydrochloride, pipobroman, piposulfan, pirarubicin, piritrexim, piroxantrone hydrochloride, placetin A, placetin B, plasminogen activator inhibitor, platinum complex, platinum compounds, platinum-triamine complex, plicamycin, plomestane, porfimer sodium, porfiromycin, prednimustine, procarbazine hydrochloride, propyl bis-acridone, prostaglandin J2, prostatic carcinoma antiandrogen, proteasome inhibitors, protein A-based immune modulator, protein kinase C inhibitor, protein tyrosine phosphatase inhibitors, purine nucleoside phosphorylase inhibitors, puromycin, puromycin hydrochloride, purpurins, pyrazorurin, pyrazoloacridine, pyridoxylated hemoglobin polyoxyethylene conjugate, RAF antagonists, raltitrexed, ramosetron, RAS farnesyl protein transferase inhibitors, RAS inhibitors, RAS-GAP inhibitor, retelliptine demethylated, rhenium RE 186 etidronate, rhizoxin, riboprine, ribozymes, RH retinamide, RNAi, rogletimide, rohitukine, romurtide, roquinimex, rubiginone Bl, ruboxyl, safingol, safingol hydrochloride, saintopin, sarcnu, sarcophytol A, sargramostim, SDI1 mimetics, semustine, senescence derived inhibitor 1, sense oligonucleotides, signal transduction inhibitors, signal transduction modulators, simtrazene, single chain antigen binding protein, sizofiran, sobuzoxane, sodium borocaptate, sodium phenylacetate, solverol, somatomedin binding protein, sonermin, sparfosafe sodium, sparfosic acid, sparsomycin, spicamycin D, spirogermanium hydrochloride, spiromustine, spiroplatin, splenopentin, spongistatin 1, squalamine, stem cell inhibitor, stem-cell division inhibitors, stipiamide, streptonigrin, streptozocin, stromelysin inhibitors, sulfinosine, sulofenur, superactive vasoactive intestinal peptide antagonist, suradista, suramin, swainsonine, synthetic glycosaminoglycans, talisomycin, tallimustine, tamoxifen methiodide, tauromustine, tazarotene, tecogalan sodium, tegafur, tellurapyrylium, telomerase inhibitors, teloxantrone hydrochloride, temoporfin, temozolomide, teniposide, teroxirone, testolactone, tetrachlorodecaoxide, tetrazomine, thaliblastine, thalidomide, thiamiprine, thiocoraline, thioguanine, thiotepa, thrombopoietin, thrombopoietin mimetic, thymalfasin, thymopoietin receptor agonist, thymotrinan, thyroid stimulating hormone, tiazofurin, tin ethyl etiopurpurin, tirapazamine, titanocene dichloride, topotecan hydrochloride, topsentin, toremifene, toremifene citrate, totipotent stem cell factor, translation inhibitors, trestolone acetate, tretinoin, triacetyluridine, triciribine, triciribine phosphate, trimetrexate, trimetrexate glucuronate, triptorelin, tropisetron, tubulozole hydrochloride, turosteride, tyrosine kinase inhibitors, tyrphostins, UBC inhibitors, ubenimex, uracil mustard, uredepa, urogenital sinus-derived growth inhibitory factor, urokinase receptor antagonists, vapreotide, variolin B, velaresol, veramine, verdins, verteporfin, vinblastine sulfate, vincristine sulfate, vindesine, vindesine sulfate, vinepidine sulfate, vinglycinate sulfate, vinleurosine sulfate, vinorelbine or vinorelbine tartrate, vinrosidine sulfate, vinxaltine, vinzolidine sulfate, vitaxin, vorozole, zanoterone, zeniplatin, zilascorb, zinostatin, zinostatin stimalamer, or zorubicin hydrochloride.

[0101] For example, one can generate a variant Fc region of an antibody with improved C1q binding and improved FcγRIII binding (e.g., having both improved ADCC activity and improved CDC activity). Alternatively, if it is desired that effector function be reduced or ablated, a variant Fc region can be engineered with reduced CDC activity and/or reduced ADCC activity. In other embodiments, only one of these activities may be increased, and, optionally, also the other activity reduced (e.g., to generate an Fc region variant with improved ADCC activity, but reduced CDC activity and vice versa).

[0102] A single chain variable fragment (scFv) is a fusion of the variable regions of the heavy and light chains of immunoglobulins, linked together with a short (usually serine, glycine) linker. This chimeric molecule retains the specificity of the original immunoglobulin, despite removal of the constant regions and the introduction of a linker peptide. This modification usually leaves the specificity unaltered. These molecules were created historically to facilitate phage display where it is highly convenient to express the antigen-binding domain as a single peptide. Alternatively, scFv can be created directly from subcloned heavy and light chains derived from a hybridoma or B cell. Single chain variable fragments lack the constant Fc region found in complete antibody molecules, and thus, the common binding sites (e.g., protein A/G) used to purify antibodies. These fragments can often be purified/immobilized using Protein L since Protein L interacts with the variable region of kappa light chains.

[0103] Flexible linkers generally are comprised of helix- and turn-promoting amino acid residues such as alanine, serine, and glycine. However, other residues can function as well. Phage display can be used to rapidly select tailored linkers for single-chain antibodies (scFvs) from protein linker libraries. A random linker library was constructed in which the genes for the heavy and light chain variable domains were linked by a segment encoding an 18-amino acid polypeptide of variable composition. The scFv repertoire (approx. 5×106 different members) is displayed on filamentous phage and subjected to affinity selection with hapten. The population of selected variants exhibited significant increases in binding activity but retained considerable sequence diversity. Sequence analysis revealed a conserved proline in the linker two residues after the VH C terminus and an abundance of arginines and prolines at other positions as the only common features of the selected tethers. In certain embodiments, the antibody fragments are further modified to increase their serum half-life by using modified Fc regions or mutations to the various constant regions, as are known in the art.

[0104] In certain embodiments, the antibodies of the present invention are formulated for administration to humans. For example, the antibodies of the present invention can be included in a pharmaceutical composition formulated for an administration that is: intranasal, intrapulmonary, intrabronchial, intravenous, oral, intraadiposal, intraarterial, intraarticular, intracranial, intradermal, intralesional, intramuscular, intrapericardial, intraperitoneal, intrapleural, intravesicular, local, mucosal, parenteral, enteral, subcutaneous, sublingual, topical, transbuccal, transdermal, via inhalation, via injection, in creams, in lipid compositions, via a catheter, via a lavage, via continuous infusion, via infusion, via local delivery, or via localized perfusion, and wherein the composition is a serum, drop, gel, ointment, spray, reservoir, or mist.

[0105] As used herein, the term “antigen” refers to a molecule containing one or more epitopes (either linear, conformational or both) that will stimulate a host's immune-system to make a humoral and/or cellular antigen-specific response. The term is used interchangeably with the term “immunogen.” Normally, a B-cell epitope will include at least about 5 amino acids but can be as small as 3-4 amino acids. A T-cell epitope, such as a CTL epitope, will include at least about 7-9 amino acids, and a helper T-cell epitope at least about 12-20 amino acids. Normally, an epitope will include between about 7 and 15 amino acids, such as, 9, 10, 12 or 15 amino acids. The term includes polypeptides, which include modifications, such as deletions, additions and substitutions (generally conservative in nature) as compared to a native sequence, so long as the protein maintains the ability to elicit an immunological response, as defined herein. These modifications may be deliberate, as through site-directed mutagenesis, or may be accidental, such as through mutations of hosts, which produce the antigens.

[0106] As used herein, the term “target antigen” refers to a refers to a molecule containing one or more epitopes (either linear, conformational or both) against which an antibody or binding fragment thereof has been raised and will be combined with the anti-CD3 antibodies or binding fragments thereof what will be combined to form a bispecific antibody that has a predetermined activity.

[0107] As used herein, the terms “predetermined activity” or “predetermined immune cell activity” or “predetermined threshold” refer to an activity of the bispecific or multivalent antibody or antigen binding fragments thereof that cause binding of the bispecific or multivalent antibody or antigen binding fragments thereof to one or more cognate binding targets and that together trigger an immune response, which can include, e.g., T cell killing, CD8 T cell activation, T cell proliferation, B cell proliferation, cytokine secretion, lymphokine secretion, TNF-alpha secretion, IFN-gamma secretion, IL-2 secretion, IL-10 secretion, antigen binding, CD3 binding, T cell anergy, T cell tolerance, NK cell activation, antibody dependent cell cytotoxicity (ADCC), T cell dependent cell cytotoxicity (TDCC), or immune cell suppression, secretion of immune activating cytokine(s)/lymphokine(s), secretion of immune suppressing cytokine(s)/lymphokine(s), T effector activity, or T regulatory cell activity. In another example, the predetermined phenotype, function or attribute is an effector function associated with T cell activation state, is a cell surface phenotype or is a pharmacokinetic activity. Non-limiting examples of phenotype activities are the expression or surface expression of one or more markers generally associated with one or more sub-types or subpopulations of T cells, or phenotypes thereof. T cell subtypes and subpopulations may include CD4+ and/or of CD8+ T cells and subtypes thereof that may include naive T cells, effector T cells, memory T cells and sub-types thereof, such as stem cell memory T, central memory T, effector memory T, T effector memory cells or terminally differentiated effector memory T cells, tumor-infiltrating lymphocytes (TIL), immature T cells, mature T cells, helper T cells, cytotoxic T cells, mucosa-associated invariant T (MAIT) cells, regulatory T (Treg) cells, helper T cells, such as TH1 cells, TH2 cells, TH3 cells, TH17 cells, TH9 cells, TH22 cells, follicular helper T cells, alpha/beta T cells, and delta/gamma T cells.

[0108] As used herein, the term “epitope” refers to a specific amino acid sequence or molecule (such as a carbohydrate, small molecule, lipid, etc.) that when present in the proper conformation, provides a reactive site for an antibody (e.g., B cell epitope) or in the case of a peptide to a T cell receptor (e.g., T cell epitope).

[0109] Portions of a given polypeptide that include a B-cell epitope can be identified using any number of epitope mapping techniques that are known in the art. (See, e.g., Epitope Mapping Protocols in Methods in Molecular Biology, Vol. 66, Glenn E. Morris, Ed., 1996, Humana Press, Totowa, N.J.). For example, linear epitopes can be determined by, e.g., concurrently synthesizing large numbers of peptides on solid supports, the peptides corresponding to portions of the protein molecule, and reacting the peptides with antibodies while the peptides are still attached to the supports. Such techniques are known in the art and described in, e.g., U.S. Pat. No. 4,708,871; Geysen et al. (1984) Proc. Natl. Acad Sci. USA 81:3998-4002; Geysen et al. (1986) Molec. Immunol. 23:709-715.

[0110] As used herein, the term “substantially purified” refers to isolation of a substance (compound, polynucleotide, protein, polypeptide, polypeptide composition) such that the substance comprises the majority percent of the sample in which it resides. Typically, in a sample a substantially purified component comprises 50%, preferably 80%-85%, more preferably 90-95% of the sample. Techniques for purifying polynucleotides and polypeptides of interest are well-known in the art and include, for example, ion-exchange chromatography, affinity chromatography and sedimentation according to density.

[0111] The practice of the present invention employs, unless otherwise indicated, conventional methods of chemistry, biochemistry, molecular biology, immunology, and pharmacology, within the skill of the art. Such techniques are explained fully in the literature. See, e.g., Remington's Pharmaceutical Sciences, 18th Edition (Easton, Pa.: Mack Publishing Company, 1990); Methods In Enzymology (S. Colowick and N. Kaplan, eds., Academic Press, Inc.); and Handbook of Experimental Immunology, Vols. I-IV (D. M. Weir and C. C. Blackwell, eds., 1986, Blackwell Scientific Publications); Sambrook, et al., Molecular Cloning: A Laboratory Manual (2nd Edition, 1989); Short Protocols in Molecular Biology, 4th ed. (Ausubel et al. eds., 1999, John Wiley & Sons); Molecular Biology Techniques: An Intensive Laboratory Course, (Ream et al., eds., 1998, Academic Press); PCR (Introduction to Biotechniques Series), 2nd ed. (Newton & Graham eds., 1997, Springer Verlag); Fundamental Virology, Second Edition (Fields & Knipe eds., 1991, Raven Press, New York), relevant portion incorporated herein by reference.

[0112] Conservative amino acid substitutions involve replacement of the aliphatic or hydrophobic amino acids Ala, Val, Leu and Ile; replacement of the hydroxyl residues Ser and Thr; replacement of the acidic residues Asp and Glu; replacement of the amide residues Asn and Gln, replacement of the basic residues Lys, Arg, and His; replacement of the aromatic residues Phe, Tyr, and Trp, and replacement of the small-sized amino acids Ala, Ser, Thr, Met, and Gly.

[0113] The skilled artisan will recognize that antibodies that exhibit little or no binding to a target antigen can be described as having a low affinity, and a high equilibrium dissociation constant (KD) for the target antigen. The skilled artisan will also recognize that antibodies that exhibit little or no binding to a collective assembly of target antigenic epitopes can be described as having a low avidity, and a high equilibrium dissociation constant (KD) for the collective assembly of target antigenic epitopes.

[0114] In some embodiments, provided herein are bispecific, modulatable antibody or fragments thereof having a binding affinity (KD) to CD3 of about 5 M to about 5 pM, about 1 M to about 5 pM, about 0.5 M to about 5 pM, about 0.1 M to about 5 pM, about 50 nM to about 5 pM, about 10 nM to about 5 pM, about 5 nM to about 5 pM, about 1 nM to about 5 pM, about 0.5 nM to about 5 pM, about 0.1 nM to about 5 pM, about 50 pM to about 5 pM, about 10 pM to about 5 pM.

[0115] In some embodiments, bispecific, modulatable antibody or fragments thereof have a binding avidity (KD) to CD3 of about 500 nM to about 0.1 pM, about 100 nM to about 0.1 pM, about 50 nM to about 0.1 pM, about 10 nM to about 0.1 pM, about 5 nM to about 0.1 pM, about 1 nM to about 0.1 pM, about 0.5 nM to about 0.1 pM, about 0.1 nM to about 0.1 pM, about 50 pM to about 0.1 pM, about 10 pM to about 0.1 pM, about 5 pM to about 0.1 pM, about 1 pM to about 0.1 pM, about 0.5 pM to about 0.1 pM.

[0116] In some embodiments, bispecific, modulatable antibody or fragments thereof have a half maximal effective concentration (EC50) to anti-CD3 of about 500 nM to about 0.001 nM, about 100 nM to about 0.001 nM, about 50 nM to about 0.001 nM, about 10 nM to about 0.001 nM, about 5 nM to about 0.001 nM, about 1 nM to about 0.001 nM, about 0.5 nM to about 0.001 nM, about 0.1 nM to about 0.001 nM, about 0.05 nM to about 0.001 nM, about 0.01 nM to about 0.001 nM, about 0.005 nM to about 0.001 nM.

[0117] In some embodiments, the bispecific, modulatable antibody or fragments thereof is a full-length antibody (referring to an antibody with two heavy and two light chains attached to the Fc domain, giving a ‘Y’ shape). In some embodiments the Fc domain (or simply referred to as an Fc) is a human Fc domain. In some embodiments, the Fc domain of an anti-CD3 antibody is from a human IgG1, human IgG2, human IgG3, or human IgG4.

[0118] Provided herein are sequences for exemplary anti-CD3 antibodies and antigen binding fragments thereof that are used in combination with an antigen binding fragment that targets an antigen to form a bispecific antibody, scFV, or fragments thereof. Included are complementarity determining region (CDR) sequences and the variable heavy and light domain sequences (VH, VL) that constitute the CD3 antigen binding domains of the disclosure. The discovery of these antibodies is detailed in the Examples section.

[0119] Provided herein are sequences for exemplary target antigen binding antibodies and antigen binding fragments thereof that are used in combination with the anti-CD3 antibody or antigen binding fragment thereof to form the bispecific antibody, scFV, or fragments thereof. Included are complementarity determining region (CDR) sequences and the variable heavy and light domain sequences (VH, VL) that constitute the CD3 antigen binding domains of the disclosure. The discovery of these antibodies is detailed in the Examples section.

[0120] As referred below, a light chain variable (VL) domain CDR1 region is referred to as CDR-L1; a VL CDR2 region is referred to as CDR-L2; a VL CDR3 region is referred to as CDR-L3; a heavy chain variable (VH) domain CDR1 region is referred to as CDR-H1; a VH CDR2 region is referred to as CDR-H2; and a VH CDR3 region is referred to as CDR-H3. The table herein provide exemplary CDR combinations of antibodies of the disclosure.

[0121] Each antibody arm may be connected by a linker, e.g., a flexible linker. An exemplary linker comprises the following amino acid sequence: GGGGS (SEQ ID NO:2352), GGGGG (SEQ ID NO:2353), or even GGGGSGGGGSGGGGS (SEQ ID NO:2354).

[0122] Uses of bispecific, modulatable antibody or fragments thereof. Therapeutic bispecific, modulatable antibody or fragments thereof.

[0123] In some embodiments, the bispecific, modulatable antibody or fragments thereof provided herein are useful for the treatment of a disease or condition involving an immune response. In some embodiments, the bispecific, modulatable antibody or fragments thereof provided herein are useful for the treatment of an autoimmune disease. An autoimmune disease is generally a harmful immune response to a self-antigen. Examples of autoimmune diseases include, e.g., alopecia, ankylosing spondylitis, atopic dermatitis, celiac disease, Crohn's disease, cutaneous lupus erythematosus (CLE), lupus nephritis, multiple sclerosis, neuromyelitis optica, psoriasis, psoriatic arthritis, rheumatoid arthritis, scleroderma, Sjogren's syndrome, systemic lupus, systemic lupus erythematosus (SLE), temporal arteritis, type I diabetes, ulcerative colitis, uveitis, and vitiligo.

[0124] In some embodiments, the bispecific, modulatable antibody or fragments thereof provided herein are useful for the treatment of a hyperinflammatory disease. A hyperinflammatory disease consists of a potentially harmful overstimulated immune response. Examples of hyperinflammatory diseases include, e.g., chronic allergy, hypersensitivity vasculitis, and T cell hypersensitivity disease.

[0125] In other embodiments, the bispecific, modulatable antibody or fragments thereof provided herein are useful for the treatment of cancer. In certain aspect, the bispecific, modulatable antibody or fragments thereof are used alone or in combination to target the cancer cells. In other example, the bispecific, modulatable antibody or fragments thereof are used alone or in combination to target regulatory T cells that are reducing or blocking an immune response to the cancer cells.

[0126] Administration of Therapeutic bispecific, modulatable antibody or fragments thereof.

[0127] The in vivo administration of the therapeutic bispecific, modulatable antibody or fragments thereof described herein may be carried out intravenously, intramuscularly, subcutaneously, topically, orally, transdermally, subdermally, intraperitoneally, intraorbitally, intrathecally, intraventricularly, intranasally, transmucosally, through implantation, or through inhalation. Intravenous administration may be carried out via injection or infusion. In some embodiments, the bispecific, modulatable antibody or fragments thereof of the disclosure are administered intravenously. In some embodiments, the bispecific, modulatable antibody or fragments thereof of the disclosure are administered subcutaneously. Administration of the therapeutic bispecific, modulatable antibody or fragments thereof may be performed with any suitable excipients, carriers, or other agents to provide suitable or improved tolerance, transfer, delivery, and the like.

### EXAMPLES

[0128] Engineered Epitope Design. Three engineered epitopes were built to embody solvent-accessible epitopes on the human CD3e and CD3d subunits. The target epitope sequences were PQYPGSEILWQ (SEQ ID NO: 2341) and YPRGSKPEDAN (CD3e residues) (SEQ ID NO: 2342), QDGNEEMGGITQTPYKVSISG (CD3e residues) (SEQ ID NO: 2343), and YRCNGTDIYKDKEST (CD3d residues) (SEQ ID NO: 2344).

[0129] Peptide scaffolds were computationally designed to support the native sequence and structure of the human CD3ed epitopes with the iBio Engineered Epitope machine learning engine. The design process starts with an initial set of blueprints indicating the positions of the scaffold residues to design and the positions of the epitope residues to hold fixed. The machine learning engine optimizes the scaffold residues in these initial blueprints for [1] structural match to the native epitope structure, [2] overall structural stability of the molecule, and [3] solubility of the peptide design. The number of scaffold residues in the blueprints are then iteratively removed until the machine learning engine can no longer satisfy all three of the loss functions described above. The final design is based on the blueprint that satisfies all loss functions using the minimal number of scaffold residues. These final sequence designs are listed in Table 1.

TABLE 1

| Engineered | |
|---|---|
| Epitope ID | Sequence |
| 1 | SPQYPGSEILWQKWGNKKVSYPRGSKPEDAN |
| | (SEQ ID NO: 2345) |
| 2 | QDGNEEMGGITQTPYKVSGSG |
| | (SEQ ID NO: 2346) |
| 3 | YRSNGTDIYKDKEST (SEQ ID NO: 2347) |

[0130] When the engineered epitopes are made by peptide synthesis a cysteine is introduced into the sequence for conjugation to a maleimide-functionalized carrier protein (keyhole limpet hemocyanin, ovalbumin, or ferritin) for immunizations. Alternatively, the peptides are biotinylated for antibody screening assays (SPR, ELISA, or T-cell activation assays).

[0131] Human CDR Library Designs. Starting with the two benchmark antibodies template Abl (Table 2) and template Ab2 (Table 3), the CDR sequences were simultaneously humanized and diversified with the iBio StableHu machine learning engine. The machine learning engine is trained on the Observed Antibody Space (OAS) database with masked language modeling to learn numerical embeddings for the human CDR sequences. These CDR embeddings are then rank ordered by similarity to the benchmark antibody CDR embeddings. This allows for identification of human CDR sequences that may be suitable as substitutes for the benchmark CDRs. The most similar human CDRs identified from the OAS database were used to make CDR libraries with diversities of 1000 or 2000 as shown in Table 4.

TABLE 2

| Chain | Template Ab1 Sequence |
|---|---|
| VH | EVQLVQSGSELKKPGSSVKVSCKASGVTFNSRTFTISWVRQAP |
| | GQGLEWLGSIIPIFGTITYAQKFQGRVTITADKSTSTAFMELT |
| | SLRSEDTAIYYCTRRGNWNPFDPWGQGTLVTVSS |
| | (SEQ ID NO: 2348) |
| VL | DIQMTQSPSSLSASVGDRVTITCRASQSISSYLNWYQQKPGKA |
| | PKLLIYAASSLQSGVPSRFSGSGSGTDFTLTISSLQPEDFATY |
| | YCQQSYSTPPTFGQGTKVEIK (SEQ ID NO: 2349) |

TABLE 3

| Chain | Template Ab2 Sequence |
|---|---|
| VH | EVQLVESGGGLVQPGGSLRLSCAASGFTFNTYAMNWVRQAPGK |
| | GLEWVGRIRSKYNNYATYYADSVKGRFTISRDDSKNTLYLQMN |
| | SLRAEDTAVYYCVRHGNFGNSYVSWFAYWGQGTLVTVSS |
| | (SEQ ID NO: 2350) |
| VL | DIQMTQSPSSLSASVGDRVTITCRSSTGAVTTSNYANWVQQKP |
| | GKAPKGLIGGTNKRAPGVPARFSGSGSGTDFTLTISSLQPEDF |
| | ATYYCALWYSNLWVFGQGTKVEIK (SEQ ID NO: 2351) |

TABLE 4

| | Template Ab1 | Template Ab2 |
|---|---|---|
| HCDR1 Library | 2000 | 2000 |
| HCDR2 Library | 2000 | 2000 |
| HCDR3 Library | 2000 | 2000 |
| LCDR1 Library | 2000 | 2000 |
| LCDR2 Library | 1000 | 1000 |
| LCDR3 Library | 2000 | 2000 |

[0132] Cell Sorting of Mammalian Display Libraries. CDR libraries were transfected into a mammalian display system for cell sorting. Libraries were sorted by antibody expression (APC-conjugated anti-human Fc secondary) and binding (FITC-conjugated streptavidin-CD3ed/CD3eg complex). Gates were drawn to collect the antibody-expressing populations over a range of binding levels. Sorted cells were pelleted down and stored at −80C until further processing.

[0133] NGS Sequencing and Analysis. Sorted cells were sequenced by NGS to identify clone hits. This involved cell lysis, reverse transcription into cDNA, and PCR amplification with primers appropriate for sequencing the DNA library pools on an Illumina MiSeq. Sequences were rank ordered by enrichment of clones in the binding bins compared to non-binding bins in the cell sorting. Enrichment scores were calculated as the frequency of agiven sequence in a binding bin divided by its frequency in a non-binding bin. Clones with enrichment scores of 10 or higher were subject to further testing within the capacity of the screening system (up to 10 sequences were tested from each CDR diversity library).

[0134] Immunizations. Engineered epitopes were chemically conjugated to keyhole limpet hemocyanin or ferritin for immunizations (no adjuvants were used). Every week, BALB/c mice were immunized with engineered epitopes one day, and isolated human T-cells on a separate day. After 6-8 weeks of alternating between engineered epitope and T-cell immunizations, mice were immunized with a final boost containing a cocktail of engineered epitopes and human T-cells.

[0135] Hybridoma Generation. Human monoclonal antibodies can be prepared by, e.g., the trioma technique; the human B-cell hybridoma technique (see Kozbor, et al., Hybridoma, 2:7 (1983)) and the EBV hybridoma technique to produce human monoclonal antibodies (see Cole, et al., PNAS 82:859 (1985)), or as taught herein. Human monoclonal antibodies may be utilized in the practice of the presently disclosed and claimed invention and may be produced by using human hybridomas (see Cote, et al., PNAS 80:2026 (1983)) or by transforming human B-cells with Epstein Barr Virus in vitro (see Cole, et al., 1985), relevant portions incorporated herein by reference.

[0136] ELISA CD3 Binding Screen. Antibodies were screened for binding of CD3 heterodimers by ELISA. Biotinylated CD3 epsilon+delta and CD3 epsilon+gamma were coated together in a 1:1 ratio onto streptavidin coated polystyrene assay plates for 1 hour. Plates were washed three times with PBST +1% BSA, and antibodies were incubated for 1 hour, followed by three more washes with PBST+1% BSA. Antibodies were then labeled with a species appropriate secondary antibody conjugated to horse radish peroxidase, and incubated for 1 hour. Plates were then washed three more times with PBST+1% BSA, and TMB substrate was added. After a 10 minute incubation, stop solution was added and absorbance was read out by a plate reader.

[0137] T Cell Binding Screen with Human PBMCs. Antibodies were incubated with Human PBMCs for 1 hour, washed once with DPBS+1% FBS, then labeled with secondary antibodies including anti human CD4, anti-human CD8, and a species appropriate anti-Fc for 1 hour. Cells were then washed twice more and measured by flow cytometry. CD3 binding of antibodies is measured on T cells that are CD4 or CD8 positive within the human PBMC mixture.

[0138] Label-Free CD3 Binding Kinetics as Measured by SPR. Binding kinetics of antibodies to CD3 heterodimers was carried out on a Carterra LSA. Antibodies were captured on an anti-Human Fc functionalized HC200M chip for 25 minutes, followed by 3 buffer injections to establish a blank, followed by 7 injections of a 1:3 dilution series of CD3 ordered by increasing concentration. Injection cycles consisted of a 60 second baseline, followed by a 4 minute association, followed by a 6 minute dissociation. Kinetic parameters were then fit to the data using the LSA Kinetics software.

[0139] In-Vitro Mammalian Display Library Construction from Mouse B-Cell Repertoires. Splenocytes were collected from mice after immunization, lysed in TRIzol reagent, and RNA collected by Phenol:Chloroform extraction. After reverse transcription, variable heavy and variable light chains were amplified using a primer set designed based on the IMGT database of murine germline sequences (see Schaefer et al., Antibody Engineering Vol. 1 21:42 (2010), relevant portions incorporated by reference) that add adaptors containing IIs restriction enzyme sites that allow assembly into a transmembrane bound mammalian expression plasmid in scFv format. Assembled plasmids are transformed into bacteria and collected after an overnight culture under selection conditions. Recovered plasmids are then transiently transfected into Exp1293F expression cell lines to generate a mammalian display library for subsequent sorting.

Lengthy table referenced here
US20260103519A1-20260416-T00001
Please refer to the end of the specification for access instructions.

Lengthy table referenced here
US20260103519A1-20260416-T00002
Please refer to the end of the specification for access instructions.

Lengthy table referenced here
US20260103519A1-20260416-T00003
Please refer to the end of the specification for access instructions.

Lengthy table referenced here
US20260103519A1-20260416-T00004
Please refer to the end of the specification for access instructions.

Lengthy table referenced here
US20260103519A1-20260416-T00005
Please refer to the end of the specification for access instructions.

Lengthy table referenced here
US20260103519A1-20260416-T00006
Please refer to the end of the specification for access instructions.

Lengthy table referenced here
US20260103519A1-20260416-T00007
Please refer to the end of the specification for access instructions.

Lengthy table referenced here
US20260103519A1-20260416-T00008
Please refer to the end of the specification for access instructions.

Lengthy table referenced here
US20260103519A1-20260416-T00009
Please refer to the end of the specification for access instructions.

Lengthy table referenced here
US20260103519A1-20260416-T00010
Please refer to the end of the specification for access instructions.

Lengthy table referenced here
US20260103519A1-20260416-T00011
Please refer to the end of the specification for access instructions.

Lengthy table referenced here
US20260103519A1-20260416-T00012
Please refer to the end of the specification for access instructions.

Lengthy table referenced here
US20260103519A1-20260416-T00013
Please refer to the end of the specification for access instructions.

Lengthy table referenced here
US20260103519A1-20260416-T00014
Please refer to the end of the specification for access instructions.

[0140] FIGS. 1A and 1B illustrate the two paths to anti-CD3 specific antibody discovery by engineered-epitope immunization and screening or by StableHu optimizer, the antibodies are screened for binding and T cell activation.

[0141] FIG. 2 shows the engineered epitopes steered immunization to three CD3 repertoires that were cloned and screened by mammalian display, followed by multimodal screening

[0142] FIG. 3 shows the EngageTx method in which anti-CD3 antibodies and the target antigen are selected for diversity of T cell binding and activation. For example, 68 prioritized clones are selected, with a >1000×T cell binding range, capable of T cell activation with >800× activation, then 10 clones were selected, in this example, to create MUC16 and TROP-2 bispecifics. Then the bispecifics were tested on OVCAR-1 cells with primary human peripheral blood mononuclear cells (PBMCs). The legend indicates that the following clones were used: CD3 1, CD3 2, CD3 3, CD3 4, CD3 5, control and SP34 as a generation 1 benchmark.

[0143] FIG. 4 are graphs that shows epitope-steered immunization and StableHu generated CD3 bispecific antibodies of nine anti-CD3 clones in a bispecific against MUC16 that are shown to generate a 1000× range of activity. The activity of the bispecific antibodies are shown for T cell killing, CD8 T cell activation, interferon-gamma secretion and tumor necrosis factor-alpha secretion.

[0144] FIG. 5 are graphs that shows epitope-steered immunization and StableHu generated CD3 bispecific antibodies of nine anti-CD3 clones in a bispecific against TROP-2 that are shown to generate a 1000× range of activity. The activity of the bispecific antibodies is shown for T cell killing, CD8 T cell activation, interferon-gamma secretion and tumor necrosis factor-alpha secretion.

[0145] FIG. 6 shows that different tumor antigen binders require different CD3 arms. The activity of the bispecific antibodies is shown for T cell killing, CD8 T cell activation, interferon-gamma secretion and tumor necrosis factor-alpha secretion. It is shown that the CD3 Arm 1 created active TROP-2 but not an active MUC16 bispecific.

[0146] FIG. 7 shows that different tumor antigen binders require different CD3 arms. The activity of the bispecific antibodies is shown for T cell killing, CD8 T cell activation, interferon-gamma secretion and tumor necrosis factor-alpha secretion. It is shown that the CD3 Arm 2 created active MUC16 but not an active TROP-2 bispecific.

[0147] FIG. 8 shows that bispecific mammalian display enabled whole molecule optimization. T-cell dependent cellular cytotoxicity (TDCC) and T cell activation assay. Ovcar3 cells (ATCC, HTB-161) were cultured in RPMI (ATCC, 30-2001) supplemented with 20% FBS (Sigma, F5135) and 1× Penicillin-Streptomycin (Corning, 30-002-CI), 0.01 mg/ml bovine insulin.

[0148] For the TDCC PBMC assay, Ovcar3 cells were counted to assess the cell number and viability. The cells were stained with CFSE. Cells were centrifuged and resuspended in growth media at 1×10⁵ cells/ml seeded at 1×10⁴ cells per well onto 96-well plates (VWR, 89131-676) and incubated in a cell culture incubator overnight. Antibodies in the assay media were added to the cells at increasing concentrations for 20 minutes at 37° C., 5% C02. After that, 2×10\hat{ }5 peripheral blood mononuclear cells (PBMC) (Stemcell, 70025.1) were added per well of a 96-well plate. Cells and antibodies were incubated at 37° C. in 5% C02 for 48 hrs. Samples were then stained with LIVE/DEAD™ fixable Aqua Dead Cell Stain Kit (Thermo Fisher, L34957), and an antibody cocktail (CD32/CD16 blocker, CD3-BV605, CD4-PerCP/Cy5.5, CD8a-APC, CD69-PE, CD25-APC/Cy7 (Biolegend)). Samples were then analyzed using a flow cytometer (MacsQuant 16, Miltenyi). The percentage of dead target cells was gated for FITC+ Live/Dead+. The early activated CD4+ cells were gated as: Live/Dead−, CD3+, CD4+, CD69+. The early activated CD8+ cells were gated as: Live/Dead−, CD3+, CD8+, CD69+. The later activated CD4+ cells were gated as: Live/Dead−, CD3+, CD4+, CD25+. The late activated CD8+ cells were gated as: Live/Dead−, CD3+, CD8+, CD69+. The EC50 value was calculated using GraphPad Prism 9.3.0.

[0149] Measurement of cytokine release. Cytokine release was measured using a custom U-PLEX Biomarker Assay kit (Meso Scale Discovery K15067M) allowing for quantification of IFNγ, IL-2, IL-6, and TNFα according to the kit instructions. Briefly, biotinylated capture antibodies were conjugated to unique linkers and applied to the plate to capture them on particular spots. Cell-culture supernatants were taken from the TDCC assay at the 24-hour time point and diluted 1:10 in Diluent 57 (Mesoscale) before being applied to the plate, after which a mixture of detection antibodies diluted in Diluent 3 was added to each well. Each incubation step was carried out for 1 hour at room temperature with light agitation with 3×150 μL washes with PBST in between. After the final wash, 150 L/well of MSD GOLD Read Buffer B was added and the plate was read on the MESO QuickPlex SQ 120MM instrument. Cytokine concentrations were determined using the Discovery Workbench software.

TABLE 23
MUC16 Bispecifics With Different CD3 Arms Formatted as
2 × 2 Antibodies Derived from StableHu Antibody Optimizer.

| | Cell | | | | |
|---|---|---|---|---|---|
| | Lysis | T-Cell Activation | | Cytokine release | |
| Antibody | EC₅₀ | EC₅₀ (pM) | | EC₅₀ (pM) | |
| Name | (pM) | CD4+ | CD8+ | IFNγ | TNFα |
| Original | 0.17 | 0.27 | 0.33 | 1.11 | 9.35 |
| SP34 × MUC16 | | | | | |
| S34_05- | ND | 0.10 | 0.02 | * | * |
| B04 × MUC16** | | | | | |
| S34_15- | 0.08 | 0.40 | 0.97 | * | * |
| G08 × MUC16 | | | | | |
| S34_14- | 0.12 | 1.48 | 3.57 | * | * |
| G09 × MUC16 | | | | | |
| S34_16- | 0.93 | 0.48 | 1.42 | * | * |
| C08 × MUC16 | | | | | |
| S34_16- | 1.07 | 2.30 | 2.91 | 6.96 | 42.46 |
| H08 × MUC16 | | | | | |
| S34_06- | 3.34 | 10.04 | 12.72 | 67.44 | 192.90 |
| C03 × MUC16 | | | | | |
| S34_06- | 9.76 | 15.91 | 13.17 | 598.90 | 1.18 |
| F05 × MUC16 | | | | | |
| S34_14- | 93.61 | 400.90 | 629.20 | * | * |
| G10 × MUC16 | | | | | |

TABLE 24
MUC16 Bispecifics With Different CD3 Arms Formatted as
2 × 2 Antibodies Derived from Immunization Campaign.

| | Cell | | | | |
|---|---|---|---|---|---|
| | Lysis | T-Cell Activation | | Cytokine release | |
| Antibody | EC₅₀ | EC₅₀ (pM) | | EC₅₀ (pM) | |
| Name | (pM) | CD4+ | CD8+ | IFNγ | TNFα |
| Original | 0.1682 | 0.2696 | 0.3306 | 1.114 | 9.354 |
| SP34 × | | | | | |
| MUC16 | | | | | |
| C3I_01- | 1.295 | 268 | 128.7 | 8346 | 57360 |
| F05 × | | | | | |
| MUC16 | | | | | |

TABLE 25
TROP-2 Bispecifics With Different CD3 Arms Formatted as
2 × 2 Antibodies Derived from StableHu Antibody Optimizer.

| | Cell | | | | |
|---|---|---|---|---|---|
| | Lysis | T-Cell Activation | | Cytokine release | |
| Antibody | EC₅₀ | EC₅₀ (pM) | | EC₅₀ (pM) | |
| Name | (pM) | CD4+ | CD8+ | IFNγ | TNFα |
| Original SP34 × TROP-2** | ND | ND | ND | 5590 | 1802 |
| S34_05-B04 × TROP-2** | ND | ND | ND | * | * |
| S34_15-G08 × TROP-2** | ND | ND | ND | * | * |
| S34_14-G09 × TROP-2** | ND | ND | ND | * | * |
| S34_16-C08 × TROP-2** | ND | ND | ND | * | * |
| S34_16-H08 × TROP-2** | ND | ND | ND | ND | ND |
| S34_06-C03 × TROP-2 | 0.806 | ND | ND | 62.15 | 187.8 |
| S34_06-F05 × TROP-2** | ND | ND | ND | ND | ND |
| S34_14-G10 × TROP-2 | 1.2 | ND | ND | * | * |

**Molecule too potent to determine EC50

TABLE 26
TROP-2 Bispecifics With Different CD3 Arms Formatted as
2 × 2 Antibodies Derived from Immunization Campaign.

| | Cell | | | | |
|---|---|---|---|---|---|
| | Lysis | T-Cell Activation | | Cytokine release | |
| Antibody | EC₅₀ | EC₅₀ (pM) | | EC₅₀ (pM) | |
| Name | (pM) | CD4+ | CD8+ | IFNγ | TNFα |
| Original SP34 × TROP-2* | NA | NA | NA | 5590 | 1802 |
| C3I_05-F03 × TROP-2 | 1.295 | 268 | 128.7 | 8346 | 57360 |

[0150] It is contemplated that any embodiment discussed in this specification can be implemented with respect to any method, kit, reagent, or composition of the invention, and vice versa. Furthermore, compositions of the invention can be used to achieve methods of the invention.

[0151] It will be understood that particular embodiments described herein are shown by way of illustration and not as limitations of the invention. The principal features of this invention can be employed in various embodiments without departing from the scope of the invention. Those skilled in the art will recognize, or be able to ascertain using no more than routine experimentation, numerous equivalents to the specific procedures described herein. Such equivalents are considered to be within the scope of this invention and are covered by the claims.

[0152] All publications and patent applications mentioned in the specification are indicative of the level of skill of those skilled in the art to which this invention pertains. All publications and patent applications are herein incorporated by reference to the same extent as if each individual publication or patent application was specifically and individually indicated to be incorporated by reference.

[0153] The use of the word “a” or “an” when used in conjunction with the term “comprising” in the claims and/or the specification may mean “one,” but it is also consistent with the meaning of “one or more,” “at least one,” and “one or more than one.” The use of the term “or” in the claims is used to mean “and/or” unless explicitly indicated to refer to alternatives only or the alternatives are mutually exclusive, although the disclosure supports a definition that refers to only alternatives and “and/or.” Throughout this application, the term “about” is used to indicate that a value includes the inherent variation of error for the device, the method being employed to determine the value, or the variation that exists among the study subjects.

[0154] As used in this specification and claim(s), the words “comprising” (and any form of comprising, such as “comprise” and “comprises”), “having” (and any form of having, such as “have” and “has”), “including” (and any form of including, such as “includes” and “include”) or “containing” (and any form of containing, such as “contains” and “contain”) are inclusive or open-ended and do not exclude additional, unrecited elements or method steps. In embodiments of any of the compositions and methods provided herein, “comprising” may be replaced with “consisting essentially of” or “consisting of”. As used herein, the phrase “consisting essentially of” requires the specified integer(s) or steps as well as those that do not materially affect the character or function of the claimed invention.

[0155] As used herein, the term “consisting” is used to indicate the presence of the recited integer (e.g., a feature, an element, a characteristic, a property, a method/process step or a limitation) or group of integers (e.g., feature(s), element(s), characteristic(s), propertie(s), method/process steps or limitation(s)) only.

[0156] The term “or combinations thereof” as used herein refers to all permutations and combinations of the listed items preceding the term. For example, “A, B, C, or combinations thereof” is intended to include at least one of: A, B, C, AB, AC, BC, or ABC, and if order is important in a particular context, also BA, CA, CB, CBA, BCA, ACB, BAC, or CAB. Continuing with this example, expressly included are combinations that contain repeats of one or more item or term, such as BB, AAA, AB, BBC, AAABCCCC, CBBAAA, CABABB, and so forth. The skilled artisan will understand that typically there is no limit on the number of items or terms in any combination, unless otherwise apparent from the context.

[0157] As used herein, words of approximation such as, without limitation, “about”, “substantial” or “substantially” refers to a condition that when so modified is understood to not necessarily be absolute or perfect but would be considered close enough to those of ordinary skill in the art to warrant designating the condition as being present. The extent to which the description may vary will depend on how great a change can be instituted and still have one of ordinary skilled in the art recognize the modified feature as still having the required characteristics and capabilities of the unmodified feature.

[0158] In general, but subject to the preceding discussion, a numerical value herein that is modified by a word of approximation such as “about” may vary from the stated value by at least ±1, 2, 3, 4, 5, 6, 7, 10, 12 or 15%.

[0159] Additionally, the section headings herein are provided for consistency with the suggestions under 37 CFR 1.77 or otherwise to provide organizational cues. These headings shall not limit or characterize the invention(s) set out in any claims that may issue from this disclosure. Specifically and by way of example, although the headings refer to a “Field of Invention,” such claims should not be limited by the language under this heading to describe the so-called technical field. Further, a description of technology in the “Background of the Invention” section is not to be construed as an admission that technology is prior art to any invention(s) in this disclosure. Neither is the “Summary” to be considered a characterization of the invention(s) set forth in issued claims. Furthermore, any reference in this disclosure to “invention” in the singular should not be used to argue that there is only a single point of novelty in this disclosure. Multiple inventions may be set forth according to the limitations of the multiple claims issuing from this disclosure, and such claims accordingly define the invention(s), and their equivalents, that are protected thereby. In all instances, the scope of such claims shall be considered on their own merits in light of this disclosure, but should not be constrained by the headings set forth herein.

[0160] For each of the claims, each dependent claim can depend both from the independent claim and from each of the prior dependent claims for each and every claim so long as the prior claim provides a proper antecedent basis for a claim term or element.

[0161] To aid the Patent Office, and any readers of any patent issued on this application in interpreting the claims appended hereto, applicants wish to note that they do not intend any of the appended claims to invoke paragraph 6 of 35 U.S.C. § 112, U.S.C. § 112 paragraph (f), or equivalent, as it exists on the date of filing hereof unless the words “means for” or “step for” are explicitly used in the particular claim.

[0162] All of the compositions and/or methods disclosed and claimed herein can be made and executed without undue experimentation in light of the present disclosure. While the compositions and methods of this invention have been described in terms of preferred embodiments, it will be apparent to those of skill in the art that variations may be applied to the compositions and/or methods and in the steps or in the sequence of steps of the method described herein without departing from the concept, spirit and scope of the invention. All such similar substitutes and modifications apparent to those skilled in the art are deemed to be within the spirit, scope and concept of the invention as defined by the appended claims.

LENGTHY TABLES
The patent application contains a lengthy table section. A copy of the table is available in electronic form from the USPTO web site (https://seqdata.uspto.gov/docdetail?docId=US20260103519A1). An electronic copy of the table will also be available from the USPTO upon request and payment of the fee set forth in 37 CFR 1.19(b)(3).

What is claimed is:

1. A bispecific, modulatable T cell engaging antibody or antigen binding fragments thereof that binds CD3 and an antigen, comprising:
a first antibody or antigen binding fragments thereof that binds to the antigen and an Fc region;
a second antibody or antigen binding fragments thereof that binds to CD3 and an Fc region;
wherein the first and second antibody or antigen binding fragments are selected to modulate the combined binding on the bispecific antibody or antigen binding fragments thereof to reduce or enhance an activity of the bispecific, modulatable T cell engaging antibody or antigen binding fragments to a pre-determined level.

2. The bispecific, modulatable T cell engaging antibody or antigen binding fragments of claim 1, wherein the bispecific antibody comprises an scFV-Fc-ScFv bispecific antibody.

3. The bispecific, modulatable T cell engaging antibody or antigen binding fragments of claim 1, wherein the bispecific antibody comprises a tandem scFv-scFv-Fc.

4. The bispecific, modulatable T cell engaging antibody or antigen binding fragments of claim 1, wherein the activity is selected from at least one of: T cell killing, CD8 T cell activation, TNF-alpha secretion, IFN-gamma secretion, IL-2 secretion, IL-10 secretion, antigen binding, or CD3 binding.

5. The bispecific, modulatable T cell engaging antibody or antigen binding fragments of claim 1, further comprising a linker between the first and second antibody or antigen binding fragments thereof.

6. The bispecific, modulatable T cell engaging antibody or antigen binding fragments of claim 1, wherein the anti-CD3 antibody or binding fragment thereof are selected from:
a. a heavy chain variable domain (VH) complementarity determining region 1 (CDR1) comprising the amino acid sequence of any one of the following SEQ ID NOS: 1, 11, 21, 31, 41, 51, 61, 71, 81, 91, 101, 111, 121, 131, 141, 151, 161, 171, 181, 191, 201, 211, 221, 231, 241, 251, 261, 271, 281, 291, 301, 311, 321, 331, 341, 351, 361, 371, 381, 391, 401, 411, 421, 431, 441, 451, 461, 471, 481, 491, 501, 511, 521, 531, 541, 551, 561, 571, 581, 591, 601, 611, 621, 631, 641, 651, 661, 671, 681, 691, 701, 711, 721, 731, 741, 751, 761, 771, 781, 791, 801, 811, 821, 831, 841, 851, 861, 871, 881, 891, 901, 911, 921, 931, 941, 951, 961, 971, 981, 991, 1001, 1011, 1021, 1031, 1041, 1051, 1061, 1071, 1081, 1091, 1101, 1111, 1121, 1131, 1141, 1151, 1161, 1171, 1181, 1191, 1201, 1211, 1221, 1231, 1241, 1251, 1261, 1271, 1281, 1291, 1301, 1311, 1321, 1331, 1341, 1351, 1361, 1371, 1381, 1391, 1401, 1411, 1421, 1431, 1441, 1451, 1461, 1471, 1481, 1491, 1501, 1511, 1521, 1531, 1541, 1551, 1561, 1571, 1581, 1591, 1601, 1611, 1621, 1631, 1641, 1651, 1661, 1671, 1681, 1691, 1701, 1711, 1721, 1731, 1741, 1751, 1761, 1771, 1781, 1791, 1801, 1811, 1821, 1831, 1841, 1851, 1861, 1871, 1881, 1891, 1901, 1911, 1916, 1921, 1926, 1931, 1936, 1941, 1946, 1951, 1956, 1961, 1966, 1971, 1976, 1981, 1986, 1991, 1996, 2001, 2006, 2011, 2016, 2021, 2026, 2031, 2036, 2041, 2046, 2051, 2056, 2061, 2066, 2071, 2076, 2081, 2086, 2091, 2096, 2101, 2106, 2111, 2116, 2121, 2126, 2131, 2136, 2141, 2146, 2151, 2156, 2161, 2166, 2171, 2176, 2181, or 2186; and
b. a VH CDR2 comprising the amino acid sequence of any one of the following SEQ ID NOS: 2, 12, 22, 32, 42, 52, 62, 72, 82, 92, 102, 112, 122, 132, 142, 152, 162, 172, 182, 192, 202, 212, 222, 232, 242, 252, 262, 272, 282, 292, 302, 312, 322, 332, 342, 352, 362, 372, 382, 392, 402, 412, 422, 432, 442, 452, 462, 472, 482, 492, 502, 512, 522, 532, 542, 552, 562, 572, 582, 592, 602, 612, 622, 632, 642, 652, 662, 672, 682, 692, 702, 712, 722, 732, 742, 752, 762, 772, 782, 792, 802, 812, 822, 832, 842, 852, 862, 872, 882, 892, 902, 912, 922, 932, 942, 952, 962, 972, 982, 992, 1002, 1012, 1022, 1032, 1042, 1052, 1062, 1072, 1082, 1092, 1102, 1112, 1122, 1132, 1142, 1152, 1162, 1172, 1182, 1192, 1202, 1212, 1222, 1232, 1242, 1252, 1262, 1272, 1282, 1292, 1302, 1312, 1322, 1332, 1342, 1352, 1362, 1372, 1382, 1392, 1402, 1412, 1422, 1432, 1442, 1452, 1462, 1472, 1482, 1492, 1502, 1512, 1522, 1532, 1542, 1552, 1562, 1572, 1582, 1592, 1602, 1612, 1622, 1632, 1642, 1652, 1662, 1672, 1682, 1692, 1702, 1712, 1722, 1732, 1742, 1752, 1762, 1772, 1782, 1792, 1802, 1812, 1822, 1832, 1842, 1852, 1862, 1872, 1882, 1892, 1902, 1912, 1917, 1922, 1927, 1932, 1937, 1942, 1947, 1952, 1957, 1962, 1967, 1972, 1977, 1982, 1987, 1992, 1997, 2002, 2007, 2012, 2017, 2022, 2027, 2032, 2037, 2042, 2047, 2052, 2057, 2062, 2067, 2072, 2077, 2082, 2087, 2092, 2097, 2102, 2107, 2112, 2117, 2122, 2127, 2132, 2137, 2142, 2147, 2152, 2157, 2162, 2167, 2172, 2177, 2182, or 2187; and
c. a VH CDR3 comprising the amino acid sequence of any one of the following SEQ ID NOS: 3, 13, 23, 33, 43, 53, 63, 73, 83, 93, 103, 113, 123, 133, 143, 153, 163, 173, 183, 193, 203, 213, 223, 233, 243, 253, 263, 273, 283, 293, 303, 313, 323, 333, 343, 353, 363, 373, 383, 393, 403, 413, 423, 433, 443, 453, 463, 473, 483, 493, 503, 513, 523, 533, 543, 553, 563, 573, 583, 593, 603, 613, 623, 633, 643, 653, 663, 673, 683, 693, 703, 713, 723, 733, 743, 753, 763, 773, 783, 793, 803, 813, 823, 833, 843, 853, 863, 873, 883, 893, 903, 913, 923, 933, 943, 953, 963, 973, 983, 993, 1003, 1013, 1023, 1033, 1043, 1053, 1063, 1073, 1083, 1093, 1103, 1113, 1123, 1133, 1143, 1153, 1163, 1173, 1183, 1193, 1203, 1213, 1223, 1233, 1243, 1253, 1263, 1273, 1283, 1293, 1303, 1313, 1323, 1333, 1343, 1353, 1363, 1373, 1383, 1393, 1403, 1413, 1423, 1433, 1443, 1453, 1463, 1473, 1483, 1493, 1503, 1513, 1523, 1533, 1543, 1553, 1563, 1573, 1583, 1593, 1603, 1613, 1623, 1633, 1643, 1653, 1663, 1673, 1683, 1693, 1703, 1713, 1723, 1733, 1743, 1753, 1763, 1773, 1783, 1793, 1803, 1813, 1823, 1833, 1843, 1853, 1863, 1873, 1883, 1893, 1903, 1913, 1918, 1923, 1928, 1933, 1938, 1943, 1948, 1953, 1958, 1963, 1968, 1973, 1978, 1983, 1988, 1993, 1998, 2003, 2008, 2013, 2018, 2023, 2028, 2033, 2038, 2043, 2048, 2053, 2058, 2063, 2068, 2073, 2078, 2083, 2088, 2093, 2098, 2103, 2108, 2113, 2118, 2123, 2128, 2133, 2138, 2143, 2148, 2153, 2158, 2163, 2168, 2173, 2178, 2183, or 2188; and
d. a light chain variable domain (VL) CDR1 comprising the amino acid sequence of any one of the following SEQ ID NOS: 6, 16, 26, 36, 46, 56, 66, 76, 86, 96, 106, 116, 126, 136, 146, 156, 166, 176, 186, 196, 206, 216, 226, 236, 246, 256, 266, 276, 286, 296, 306, 316, 326, 336, 346, 356, 366, 376, 386, 396, 406, 416, 426, 436, 446, 456, 466, 476, 486, 496, 506, 516, 526, 536, 546, 556, 566, 576, 586, 596, 606, 616, 626, 636, 646, 656, 666, 676, 686, 696, 706, 716, 726, 736, 746, 756, 766, 776, 786, 796, 806, 816, 826, 836, 846, 856, 866, 876, 886, 896, 906, 916, 926, 936, 946, 956, 966, 976, 986, 996, 1006, 1016, 1026, 1036, 1046, 1056, 1066, 1076, 1086, 1096, 1106, 1116, 1126, 1136, 1146, 1156, 1166, 1176, 1186, 1196, 1206, 1216, 1226, 1236, 1246, 1256, 1266, 1276, 1286, 1296, 1306, 1316, 1326, 1336, 1346, 1356, 1366, 1376, 1386, 1396, 1406, 1416, 1426, 1436, 1446, 1456, 1466, 1476, 1486, 1496, 1506, 1516, 1526, 1536, 1546, 1556, 1566, 1576, 1586, 1596, 1606, 1616, 1626, 1636, 1646, 1656, 1666, 1676, 1686, 1696, 1706, 1716, 1726, 1736, 1746, 1756, 1766, 1776, 1786, 1796, 1806, 1816, 1826, 1836, 1846, 1856, 1866, 1876, 1886, 1896, 1906, 2161, 2166, 2171, 2176, 2181, 2186, 2191, 2196, 2201, 2206, 2211, 2216, 2221, 2226, 2231, 2236, 2241, 2246, 2251, 2256, 2261, 2266, 2271, 2276, 2281, 2286, 2291, 2296, 2301, 2306, 2311, 2316, 2321, 2326, 2331, or 2336; and
e. a VL CDR2 comprising the amino acid sequence of any one of the following SEQ ID NOS: 7, 17, 27, 37, 47, 57, 67, 77, 87, 97, 107, 117, 127, 137, 147, 157, 167, 177, 187, 197, 207, 217, 227, 237, 247, 257, 267, 277, 287, 297, 307, 317, 327, 337, 347, 357, 367, 377, 387, 397, 407, 417, 427, 437, 447, 457, 467, 477, 487, 497, 507, 517, 527, 537, 547, 557, 567, 577, 587, 597, 607, 617, 627, 637, 647, 657, 667, 677, 687, 697, 707, 717, 727, 737, 747, 757, 767, 777, 787, 797, 807, 817, 827, 837, 847, 857, 867, 877, 887, 897, 907, 917, 927, 937, 947, 957, 967, 977, 987, 997, 1007, 1017, 1027, 1037, 1047, 1057, 1067, 1077, 1087, 1097, 1107, 1117, 1127, 1137, 1147, 1157, 1167, 1177, 1187, 1197, 1207, 1217, 1227, 1237, 1247, 1257, 1267, 1277, 1287, 1297, 1307, 1317, 1327, 1337, 1347, 1357, 1367, 1377, 1387, 1397, 1407, 1417, 1427, 1437, 1447, 1457, 1467, 1477, 1487, 1497, 1507, 1517, 1527, 1537, 1547, 1557, 1567, 1577, 1587, 1597, 1607, 1617, 1627, 1637, 1647, 1657, 1667, 1677, 1687, 1697, 1707, 1717, 1727, 1737, 1747, 1757, 1767, 1777, 1787, 1797, 1807, 1817, 1827, 1837, 1847, 1857, 1867, 1877, 1887, 1897, 1907, 2162, 2167, 2172, 2177, 2182, 2187, 2192, 2197, 2202, 2207, 2212, 2217, 2222, 2227, 2232, 2237, 2242, 2247, 2252, 2257, 2262, 2267, 2272, 2277, 2282, 2287, 2292, 2297, 2302, 2307, 2312, 2317, 2322, 2327, 2332, or 2337; and
f. a VL CDR3 comprising the amino acid sequence of any one of the following SEQ ID NOS: 8, 18, 28, 38, 48, 58, 68, 78, 88, 98, 108, 118, 128, 138, 148, 158, 168, 178, 188, 198, 208, 218, 228, 238, 248, 258, 268, 278, 288, 298, 308, 318, 328, 338, 348, 358, 368, 378, 388, 398, 408, 418, 428, 438, 448, 458, 468, 478, 488, 498, 508, 518, 528, 538, 548, 558, 568, 578, 588, 598, 608, 618, 628, 638, 648, 658, 668, 678, 688, 698, 708, 718, 728, 738, 748, 758, 768, 778, 788, 798, 808, 818, 828, 838, 848, 858, 868, 878, 888, 898, 908, 918, 928, 938, 948, 958, 968, 978, 988, 998, 1008, 1018, 1028, 1038, 1048, 1058, 1068, 1078, 1088, 1098, 1108, 1118, 1128, 1138, 1148, 1158, 1168, 1178, 1188, 1198, 1208, 1218, 1228, 1238, 1248, 1258, 1268, 1278, 1288, 1298, 1308, 1318, 1328, 1338, 1348, 1358, 1368, 1378, 1388, 1398, 1408, 1418, 1428, 1438, 1448, 1458, 1468, 1478, 1488, 1498, 1508, 1518, 1528, 1538, 1548, 1558, 1568, 1578, 1588, 1598, 1608, 1618, 1628, 1638, 1648, 1658, 1668, 1678, 1688, 1698, 1708, 1718, 1728, 1738, 1748, 1758, 1768, 1778, 1788, 1798, 1808, 1818, 1828, 1838, 1848, 1858, 1868, 1878, 1888, 1898, 1908, 2163, 2168, 2173, 2178, 2183, 2188, 2193, 2198, 2203, 2208, 2213, 2218, 2223, 2228, 2233, 2238, 2243, 2248, 2253, 2258, 2263, 2268, 2273, 2278, 2283, 2288, 2293, 2298, 2303, 2308, 2313, 2318, 2323, 2328, 2333, or 2338.

7. The bispecific, modulatable T cell engaging antibody or antigen binding fragments of claim 1, wherein the anti-CD3 antibody or binding fragment thereof comprises:
a. a heavy chain comprising the amino acid sequence of any one of the following SEQ ID NOS: 4, 14, 24, 34, 44, 54, 64, 74, 84, 94, 104, 114, 124, 134, 144, 154, 164, 174, 184, 194, 204, 214, 224, 234, 244, 254, 264, 274, 284, 294, 304, 314, 324, 334, 344, 354, 364, 374, 384, 394, 404, 414, 424, 434, 444, 454, 464, 474, 484, 494, 504, 514, 524, 534, 544, 554, 564, 574, 584, 594, 604, 614, 624, 634, 644, 654, 664, 674, 684, 694, 704, 714, 724, 734, 744, 754, 764, 774, 784, 794, 804, 814, 824, 834, 844, 854, 864, 874, 884, 894, 904, 914, 924, 934, 944, 954, 964, 974, 984, 994, 1004, 1014, 1024, 1034, 1044, 1054, 1064, 1074, 1084, 1094, 1104, 1114, 1124, 1134, 1144, 1154, 1164, 1174, 1184, 1194, 1204, 1214, 1224, 1234, 1244, 1254, 1264, 1274, 1284, 1294, 1304, 1314, 1324, 1334, 1344, 1354, 1364, 1374, 1384, 1394, 1404, 1414, 1424, 1434, 1444, 1454, 1464, 1474, 1484, 1494, 1504, 1514, 1524, 1534, 1544, 1554, 1564, 1574, 1584, 1594, 1604, 1614, 1624, 1634, 1644, 1654, 1664, 1674, 1684, 1694, 1704, 1714, 1724, 1734, 1744, 1754, 1764, 1774, 1784, 1794, 1804, 1814, 1824, 1834, 1844, 1854, 1864, 1874, 1884, 1894, 1904, 1914, 1919, 1924, 1929, 1934, 1939, 1944, 1949, 1954, 1959, 1964, 1969, 1974, 1979, 1984, 1989, 1994, 1999, 2004, 2009, 2014, 2019, 2024, 2029, 2034, 2039, 2044, 2049, 2054, 2059, 2064, 2069, 2074, 2079, 2084, 2089, 2094, 2099, 2104, 2109, 2114, 2119, 2124, 2129, 2134, 2139, 2144, 2149, 2154, 2159, 2164, 2169, 2174, 2179, 2184, or 2189, and
b. a light chain comprising the amino acid sequence of any one of the following SEQ ID NOS: 9, 19, 29, 39, 49, 59, 69, 79, 89, 99, 109, 119, 129, 139, 149, 159, 169, 179, 189, 199, 209, 219, 229, 239, 249, 259, 269, 279, 289, 299, 309, 319, 329, 339, 349, 359, 369, 379, 389, 399, 409, 419, 429, 439, 449, 459, 469, 479, 489, 499, 509, 519, 529, 539, 549, 559, 569, 579, 589, 599, 609, 619, 629, 639, 649, 659, 669, 679, 689, 699, 709, 719, 729, 739, 749, 759, 769, 779, 789, 799, 809, 819, 829, 839, 849, 859, 869, 879, 889, 899, 909, 919, 929, 939, 949, 959, 969, 979, 989, 999, 1009, 1019, 1029, 1039, 1049, 1059, 1069, 1079, 1089, 1099, 1109, 1119, 1129, 1139, 1149, 1159, 1169, 1179, 1189, 1199, 1209, 1219, 1229, 1239, 1249, 1259, 1269, 1279, 1289, 1299, 1309, 1319, 1329, 1339, 1349, 1359, 1369, 1379, 1389, 1399, 1409, 1419, 1429, 1439, 1449, 1459, 1469, 1479, 1489, 1499, 1509, 1519, 1529, 1539, 1549, 1559, 1569, 1579, 1589, 1599, 1609, 1619, 1629, 1639, 1649, 1659, 1669, 1679, 1689, 1699, 1709, 1719, 1729, 1739, 1749, 1759, 1769, 1779, 1789, 1799, 1809, 1819, 1829, 1839, 1849, 1859, 1869, 1879, 1889, 1899, 1909, 2164, 2169, 2174, 2179, 2184, 2189, 2194, 2199, 2204, 2209, 2214, 2219, 2224, 2229, 2234, 2239, 2244, 2249, 2254, 2259, 2264, 2269, 2274, 2279, 2284, 2289, 2294, 2299, 2304, 2309, 2314, 2319, 2324, 2329, 2334, or 2339; or
c. an scFV selected from SEQ ID NOS: 2360; 2368; 2376; 2384; 2392; 2400; 2408; 2416; 2424; or 2432.

8. The bispecific, modulatable T cell engaging antibody or antigen binding fragments of claim 1, wherein the anti-CD3 antibody or binding fragment thereof is encoded by a nucleic acid that comprises:
a. a VH comprising the nucleic acid sequence of any one of the following SEQ ID NOS: 5, 15, 25, 35, 45, 55, 65, 75, 85, 95, 105, 115, 125, 135, 145, 155, 165, 175, 185, 195, 205, 215, 225, 235, 245, 255, 265, 275, 285, 295, 305, 315, 325, 335, 345, 355, 365, 375, 385, 395, 405, 415, 425, 435, 445, 455, 465, 475, 485, 495, 505, 515, 525, 535, 545, 555, 565, 575, 585, 595, 605, 615, 625, 635, 645, 655, 665, 675, 685, 695, 705, 715, 725, 735, 745, 755, 765, 775, 785, 795, 805, 815, 825, 835, 845, 855, 865, 875, 885, 895, 905, 915, 925, 935, 945, 955, 965, 975, 985, 995, 1005, 1015, 1025, 1035, 1045, 1055, 1065, 1075, 1085, 1095, 1105, 1115, 1125, 1135, 1145, 1155, 1165, 1175, 1185, 1195, 1205, 1215, 1225, 1235, 1245, 1255, 1265, 1275, 1285, 1295, 1305, 1315, 1325, 1335, 1345, 1355, 1365, 1375, 1385, 1395, 1405, 1415, 1425, 1435, 1445, 1455, 1465, 1475, 1485, 1495, 1505, 1515, 1525, 1535, 1545, 1555, 1565, 1575, 1585, 1595, 1605, 1615, 1625, 1635, 1645, 1655, 1665, 1675, 1685, 1695, 1705, 1715, 1725, 1735, 1745, 1755, 1765, 1775, 1785, 1795, 1805, 1815, 1825, 1835, 1845, 1855, 1865, 1875, 1885, 1895, 1905, 1915, 1920, 1925, 1930, 1935, 1940, 1945, 1950, 1955, 1960, 1965, 1970, 1975, 1980, 1985, 1990, 1995, 2000, 2005, 2010, 2015, 2020, 2025, 2030, 2035, 2040, 2045, 2050, 2055, 2060, 2065, 2070, 2075, 2080, 2085, 2090, 2095, 2100, 2105, 2110, 2115, 2120, 2125, 2130, 2135, 2140, 2145, 2150, 2155, 2160, 2165, 2170, 2175, 2180, 2185, or 2190, and
b. a VL comprising the nucleic acid sequence of any one of the following SEQ ID NOS: 10, 20, 30, 40, 50, 60, 70, 80, 90, 100, 110, 120, 130, 140, 150, 160, 170, 180, 190, 200, 210, 220, 230, 240, 250, 260, 270, 280, 290, 300, 310, 320, 330, 340, 350, 360, 370, 380, 390, 400, 410, 420, 430, 440, 450, 460, 470, 480, 490, 500, 510, 520, 530, 540, 550, 560, 570, 580, 590, 600, 610, 620, 630, 640, 650, 660, 670, 680, 690, 700, 710, 720, 730, 740, 750, 760, 770, 780, 790, 800, 810, 820, 830, 840, 850, 860, 870, 880, 890, 900, 910, 920, 930, 940, 950, 960, 970, 980, 990, 1000, 1010, 1020, 1030, 1040, 1050, 1060, 1070, 1080, 1090, 1100, 1110, 1120, 1130, 1140, 1150, 1160, 1170, 1180, 1190, 1200, 1210, 1220, 1230, 1240, 1250, 1260, 1270, 1280, 1290, 1300, 1310, 1320, 1330, 1340, 1350, 1360, 1370, 1380, 1390, 1400, 1410, 1420, 1430, 1440, 1450, 1460, 1470, 1480, 1490, 1500, 1510, 1520, 1530, 1540, 1550, 1560, 1570, 1580, 1590, 1600, 1610, 1620, 1630, 1640, 1650, 1660, 1670, 1680, 1690, 1700, 1710, 1720, 1730, 1740, 1750, 1760, 1770, 1780, 1790, 1800, 1810, 1820, 1830, 1840, 1850, 1860, 1870, 1880, 1890, 1900, 1910, 2165, 2170, 2175, 2180, 2185, 2190, 2195, 2200, 2205, 2210, 2215, 2220, 2225, 2230, 2235, 2240, 2245, 2250, 2255, 2260, 2265, 2270, 2275, 2280, 2285, 2290, 2295, 2300, 2305, 2310, 2315, 2320, 2325, 2330, 2335, or 2340; or
c. a nucleic acid encoding a scFV selected from SEQ ID NOS: 2361; 2369; 2377; 2385; 2393; 2401; 2409; 2417; 2425; or 2433.

9. The bispecific, modulatable T cell engaging antibody or antigen binding fragments of claim 1, wherein the anti-CD3 antibody or binding fragment thereof comprises:
a heavy chain variable domain (VH) comprising complementarity determining regions CDR1 to CDR3, comprising the amino acid sequence triplets of SEQ ID NOS: 1, 2, 3; 11, 12, 13; 21, 22, 23; 31, 32, 33; 41, 42, 43; 51, 52, 53; 61, 62, 63; 71, 72, 73; 81, 82, 83; 91, 92, 93; 101, 102, 103; 111, 112, 113; 121, 122, 123; 131, 132, 133; 141, 142, 143; 151, 152, 153; 161, 162, 163; 171, 172, 173; 181, 182, 183; 191, 192, 193; 201, 202, 203; 211, 212, 213; 221, 222, 223; 231, 232, 233; 241, 242, 243; 251, 252, 253; 261, 262, 263; 271, 272, 273; 281, 282, 283; 291, 292, 293; 301, 302, 303; 311, 312, 313; 321, 322, 323; 331, 332, 333; 341, 342, 343; 351, 352, 353; 361, 362, 363; 371, 372, 373; 381, 382, 383; 391, 392, 393; 401, 402, 403; 411, 412, 413; 421, 422, 423; 431, 432, 433; 441, 442, 443; 451, 452, 453; 461, 462, 463; 471, 472, 473; 481, 482, 483; 491, 492, 493; 501, 502, 503; 511, 512, 513; 521, 522, 523; 531, 532, 533; 541, 542, 543; 551, 552, 553; 561, 562, 563; 571, 572, 573; 581, 582, 583; 591, 592, 593; 601, 602, 603; 611, 612, 613; 621, 622, 623; 631, 632, 633; 641, 642, 643; 651, 652, 653; 661, 662, 663; 671, 672, 673; 681, 682, 683; 691, 692, 693; 701, 702, 703; 711, 712, 713; 721, 722, 723; 731, 732, 733; 741, 742, 743; 751, 752, 753; 761, 762, 763; 771, 772, 773; 781, 782, 783; 791, 792, 793; 801, 802, 803; 811, 812, 813; 821, 822, 823; 831, 832, 833; 841, 842, 843; 851, 852, 853; 861, 862, 863; 871, 872, 873; 881, 882, 883; 891, 892, 893; 901, 902, 903; 911, 912, 913; 921, 922, 923; 931, 932, 933; 941, 942, 943; 951, 952, 953; 961, 962, 963; 971, 972, 973; 981, 982, 983; 991, 992, 993; 1001, 1002, 1003; 1011, 1012, 1013; 1021, 1022, 1023; 1031, 1032, 1033; 1041, 1042, 1043; 1051, 1052, 1053; 1061, 1062, 1063; 1071, 1072, 1073; 1081, 1082, 1083; 1091, 1092, 1093; 1101, 1102, 1103; 1111, 1112, 1113; 1121, 1122, 1123; 1131, 1132, 1133; 1141, 1142, 1143; 1151, 1152, 1153; 1161, 1162, 1163; 1171, 1172, 1173; 1181, 1182, 1183; 1191, 1192, 1193; 1201, 1202, 1203; 1211, 1212, 1213; 1221, 1222, 1223; 1231, 1232, 1233; 1241, 1242, 1243; 1251, 1252, 1253; 1261, 1262, 1263; 1271, 1272, 1273; 1281, 1282, 1283; 1291, 1292, 1293; 1301, 1302, 1303; 1311, 1312, 1313; 1321, 1322, 1323; 1331, 1332, 1333; 1341, 1342, 1343; 1351, 1352, 1353; 1361, 1362, 1363; 1371, 1372, 1373; 1381, 1382, 1383; 1391, 1392, 1393; 1401, 1402, 1403; 1411, 1412, 1413; 1421, 1422, 1423; 1431, 1432, 1433; 1441, 1442, 1443; 1451, 1452, 1453; 1461, 1462, 1463; 1471, 1472, 1473; 1481, 1482, 1483; 1491, 1492, 1493; 1501, 1502, 1503; 1511, 1512, 1513; 1521, 1522, 1523; 1531, 1532, 1533; 1541, 1542, 1543; 1551, 1552, 1553; 1561, 1562, 1563; 1571, 1572, 1573; 1581, 1582, 1583; 1591, 1592, 1593; 1601, 1602, 1603; 1611, 1612, 1613; 1621, 1622, 1623; 1631, 1632, 1633; 1641, 1642, 1643; 1651, 1652, 1653; 1661, 1662, 1663; 1671, 1672, 1673; 1681, 1682, 1683; 1691, 1692, 1693; 1701, 1702, 1703; 1711, 1712, 1713; 1721, 1722, 1723; 1731, 1732, 1733; 1741, 1742, 1743; 1751, 1752, 1753; 1761, 1762, 1763; 1771, 1772, 1773; 1781, 1782, 1783; 1791, 1792, 1793; 1801, 1802, 1803; 1811, 1812, 1813; 1821, 1822, 1823; 1831, 1832, 1833; 1841, 1842, 1843; 1851, 1852, 1853; 1861, 1862, 1863; 1871, 1872, 1873; 1881, 1882, 1883; 1891, 1892, 1893; 1901, 1902, 1903; 1911, 1912, 1913; 1921, 1922, 1923; or 1931, 1932, 1933; and
a light chain variable domain (VL) comprising complementarity determining regions CDR1 to CDR3, comprising the amino acid sequence triplets: 6, 7, 8; 16, 17, 18; 26, 27, 28; 36, 37, 38; 46, 47, 48; 56, 57, 58; 66, 67, 68; 76, 77, 78; 86, 87, 88; 96, 97, 98; 106, 107, 108; 116, 117, 118; 126, 127, 128; 136, 137, 138; 146, 147, 148; 156, 157, 158; 166, 167, 168; 176, 177, 178; 186, 187, 188; 196, 197, 198; 206, 207, 208; 216, 217, 218; 226, 227, 228; 236, 237, 238; 246, 247, 248; 256, 257, 258; 266, 267, 268; 276, 277, 278; 286, 287, 288; 296, 297, 298; 306, 307, 308; 316, 317, 318; 326, 327, 328; 336, 337, 338; 346, 347, 348; 356, 357, 358; 366, 367, 368; 376, 377, 378; 386, 387, 388; 396, 397, 398; 406, 407, 408; 416, 417, 418; 426, 427, 428; 436, 437, 438; 446, 447, 448; 456, 457, 458; 466, 467, 468; 476, 477, 478; 486, 487, 488; 496, 497, 498; 506, 507, 508; 516, 517, 518; 526, 527, 528; 536, 537, 538; 546, 547, 548; 556, 557, 558; 566, 567, 568; 576, 577, 578; 586, 587, 588; 596, 597, 598; 606, 607, 608; 616, 617, 618; 626, 627, 628; 636, 637, 638; 646, 647, 648; 656, 657, 658; 666, 667, 668; 676, 677, 678; 686, 687, 688; 696, 697, 698; 706, 707, 708; 716, 717, 718; 726, 727, 728; 736, 737, 738; 746, 747, 748; 756, 757, 758; 766, 767, 768; 776, 777, 778; 786, 787, 788; 796, 797, 798; 806, 807, 808; 816, 817, 818; 826, 827, 828; 836, 837, 838; 846, 847, 848; 856, 857, 858; 866, 867, 868; 876, 877, 878; 886, 887, 888; 896, 897, 898; 906, 907, 908; 916, 917, 918; 926, 927, 928; 936, 937, 938; 946, 947, 948; 956, 957, 958; 966, 967, 968; 976, 977, 978; 986, 987, 988; 996, 997, 998; 1006, 1007, 1008; 1016, 1017, 1018; 1026, 1027, 1028; 1036, 1037, 1038; 1046, 1047, 1048; 1056, 1057, 1058; 1066, 1067, 1068; 1076, 1077, 1078; 1086, 1087, 1088; 1096, 1097, 1098; 1106, 1107, 1108; 1116, 1117, 1118; 1126, 1127, 1128; 1136, 1137, 1138; 1146, 1147, 1148; 1156, 1157, 1158; 1166, 1167, 1168; 1176, 1177, 1178; 1186, 1187, 1188; 1196, 1197, 1198; 1206, 1207, 1208; 1216, 1217, 1218; 1226, 1227, 1228; 1236, 1237, 1238; 1246, 1247, 1248; 1256, 1257, 1258; 1266, 1267, 1268; 1276, 1277, 1278; 1286, 1287, 1288; 1296, 1297, 1298; 1306, 1307, 1308; 1316, 1317, 1318; 1326, 1327, 1328; 1336, 1337, 1338; 1346, 1347, 1348; 1356, 1357, 1358; 1366, 1367, 1368; 1376, 1377, 1378; 1386, 1387, 1388; 1396, 1397, 1398; 1406, 1407, 1408; 1416, 1417, 1418; 1426, 1427, 1428; 1436, 1437, 1438; 1446, 1447, 1448; 1456, 1457, 1458; 1466, 1467, 1468; 1476, 1477, 1478; 1486, 1487, 1488; 1496, 1497, 1498; 1506, 1507, 1508; 1516, 1517, 1518; 1526, 1527, 1528; 1536, 1537, 1538; 1546, 1547, 1548; 1556, 1557, 1558; 1566, 1567, 1568; 1576, 1577, 1578; 1586, 1587, 1588; 1596, 1597, 1598; 1606, 1607, 1608; 1616, 1617, 1618; 1626, 1627, 1628; 1636, 1637, 1638; 1646, 1647, 1648; 1656, 1657, 1658; 1666, 1667, 1668; 1676, 1677, 1678; 1686, 1687, 1688; 1696, 1697, 1698; 1706, 1707, 1708; 1716, 1717, 1718; 1726, 1727, 1728; 1736, 1737, 1738; 1746, 1747, 1748; 1756, 1757, 1758; 1766, 1767, 1768; 1776, 1777, 1778; 1786, 1787, 1788; 1796, 1797, 1798; 1806, 1807, 1808; 1816, 1817, 1818; 1826, 1827, 1828; 1836, 1837, 1838; 1846, 1847, 1848; 1856, 1857, 1858; 1866, 1867, 1868; 1876, 1877, 1878; 1886, 1887, 1888; 1896, 1897, 1898; 1906, 1907, 1908; 1916, 1917, 1918; 1926, 1927, 1928; or 1936, 1937, 1938; or
CDRs in scFvs of SEQ ID NO: 2360; 2368; 2376; 2384; 2392; 2400; 2408; 2416; 2424; or 2432.

10. The bispecific, modulatable T cell engaging antibody or antigen binding fragments of claim 1, wherein the anti-CD3 antibody or binding fragment thereof comprises:
a heavy chain variable domain (VH) comprising complementarity determining regions CDR1 to CDR3, comprising the amino acid sequence triplets: 1941, 1942, 1943; 1946, 1947, 1948; 1951, 1952, 1953; 1956, 1957, 1958; 1961, 1962, 1963; 1966, 1967, 1968; 1971, 1972, 1973; 1976, 1977, 1978; 1981, 1982, 1983; 1986, 1987, 1988; 1991, 1992, 1993; 1996, 1997, 1998; 2001, 2002, 2003; 2006, 2007, 2008; 2011, 2012, 2013; 2016, 2017, 2018; 2021, 2022, 2023; 2026, 2027, 2028; 2031, 2032, 2033; 2036, 2037, 2038; 2041, 2042, 2043; 2046, 2047, 2048; 2051, 2052, 2053; 2056, 2057, 2058; 2061, 2062, 2063; 2066, 2067, 2068; 2071, 2072, 2073; 2076, 2077, 2078; 2081, 2082, 2083; 2086, 2087, 2088; 2091, 2092, 2093; 2096, 2097, 2098; 2101, 2102, 2103; 2106, 2107, 2108; 2111, 2112, 2113; 2116, 2117, 2118; 2121, 2122, 2123; 2126, 2127, 2128; 2131, 2132, 2133; 2136, 2137, 2138; 2141, 2142, 2143; 2146, 2147, 2148; 2151, 2152, 2153; 2156, 2157, 2158; 2161, 2162, 2163; 2166, 2167, 2168; 2171, 2172, 2173; 2176, 2177, 2178; 2181, 2182, 2183; or 2186, 2187, 2188; and
a light chain variable domain (VL) comprising complementarity determining regions CDR1 to CDR3, comprising the amino acid sequence triplets: 2191, 2192, 2193; 2196, 2197, 2198; 2201, 2202, 2203; 2206, 2207, 2208; 2211, 2212, 2213; 2216, 2217, 2218; 2221, 2222, 2223; 2226, 2227, 2228; 2231, 2232, 2233; 2236, 2237, 2238; 2241, 2242, 2243; 2246, 2247, 2248; 2251, 2252, 2253; 2256, 2257, 2258; 2261, 2262, 2263; 2266, 2267, 2268; 2271, 2272, 2273; 2276, 2277, 2278; 2281, 2282, 2283; 2286, 2287, 2288; 2291, 2292, 2293; 2296, 2297, 2298; 2301, 2302, 2303; 2306, 2307, 2308; 2311, 2312, 2313; 2316, 2317, 2318; 2321, 2322, 2323; 2326, 2327, 2328; 2331, 2332, 2333; or
2336, 2337, 2338; 2360; 2368; 2376; 2384; 2392; 2400; 2408; 2416; 2424; or 2432.

11. The bispecific, modulatable T cell engaging antibody or antigen binding fragments of claim 1, wherein the antigen or a tumor associated antigen is selected from 4-1BBL, AFP, AKAP-4, ALK, androgen receptor, bcr-abl, C1orf186, CA-125, CA6, CA6, CA19-9, CAMPATH-1, Carbonic anhydrase IX, carcinoembryonic antigen (CEA), CCR8, CD1, CD2, CD3, CD4, CD5, CD8, CD16A, CD19, CD1A, CD20, CD204, CD204, CD204, CD206, CD206, CD206, CD25, CD276, CD28, CD30, CD301, CD301, CD32A, CD32B, CD33, CD36, CD37, CD39, CD40, CD45, CD47, CD5, CD64, CD73, CEA, CLEC4C, CLDN16, CLDN6, CLDN18.2, CLEC10A, CLEC12A, CLEC5A, CLEC9A, CMET, CTCFL, cyclin B1, CYP1B1, DC-SIGN, DEC-205, Dectin1, Dectin2, DLL3, EGFR, EGFRvIII, Endoglin, endosialin, EPCAM, EphA2, epidermal growth factor, ERG, ETV6-AML, ferritin, fibroblast activation protein (FAP), FLT3, folate-binding protein, Fos-related antigen 1, FRA, fucosyl GM1, G250, GD2, GD3, Glycoprotein A33, GloboH, GLP-3, GM2, GM3, gp100, HER2, HER2/neu, HER3, HLD-DR, HMWMAA, HPV E6, HPV E7, hTERT, HVEM, IL-2 receptor, IV1, Latent-TGFB, LCK, Legumain, Ley, LIV1, LMP2, LY6E, MAD-CT-1, MAD-CT-2, MAGE A1, MAGE A3, mannose scavenger receptor1, MARCO, MelanA/MARTI, mesothelin (MSLN), metalloproteinase, ML-IAP, MSLN, MUC1, MUC15, MUC16, MYCN, myostatin, NA17, NAPI2B, NAPI2B, NY-BR-1, NY-ESO-1, OX40L, OY-TESI, p185HER2, P53 mutant, P53 nonmutant, PAGE4, PAP, PAX3, PAX5, PDGFR-B, PDL, PDL1, PLAV1, polysialic acid, PRI, PSA, PSCA, PSMA, PTK7, Ras mutant, RGS5, RhoC, RON, ROR1, ROR2, RRC15, SART3, SIRPA, Sperm protein 17, SSX2, STn, survivin, TAG-72, tenascin, TGFB, Tic 3, TMEM238, TMPRSS3, TMPRSS4, Tn, TRA6, TROP2, TRP-2, tyrosinase, UPK1B, vascular endothelial growth factor, VEGFR, VEGFR2, VISTA, VTCN1, WT1, XAGE 1, or Y6E.

12. The bispecific, modulatable T cell engaging antibody or antigen binding fragments of claim 1, wherein the bispecific, modulatable T cell engaging antibody or antigen binding fragments has a binding or activation that differs from the following antibodies: ABT806 (EGFRvIII), adecatumumab (EPCAM), alemtuzumab (CD33), AMG595 (EGFRvIII), anctumab (MSLN), anti-ACE2, anti-EphA2 (EphA2), anti-hyaluronidase, anti-neuraminidase, anti-NY-ESO-1, anti-PTK7 (PTK7), cetuximab (EGFR), cirmtuzumab (ROR1), clivatuzumab (MUC1), CT-011 (PD1), DS-8895a variant 1 (EphA2), DS-8895a variant 2 (EphA2), durvalumab (PDL1) anti-MAGE-A3, edrecolomab (EPCAM), farletuzumab (FRA/folate receptor alpha), Gemtuzumab ozogamicin (CD33), huDS6 (CA6), humanized Ab 2-3 (CEA), humanized PR1A3 (CEA), ibritumomab tiuxetan (CD52), IMAB362/claudiximab (Claudin18.2), ipilimumab (CTLA4), J591 variant 1 (PSMA), J591 variant 2 (PSMA), ladiratuzumab (LIV1), lifastuzumab (NAPI2B), MEDI-547 (EphA2), mirvetuximab (FRA), narnatumab (RON), nimotuzumab (EGFR), nivolumab (PD1), onartuzumab (c-MET), panitumumab (EGFR), patritumab (HER3), pembrolizumab (PD1), pertuzumab (HER2/neu), PF-06647020 (PTK7), RG7841 (LY6E), rituximab (CD20), rovalpituzumab (DLL3), sacituzumab (TROP2), sibrotuzumab (FAP), sofituzumab (MUC16), tositumomab (CD20), trastuzumab (HER2/neu), tremelimumab (CP-675,206) (CTLA4), zalutumumab (EGFR), or bispecific antibody or antigen binding fragments thereof.

13. The bispecific, modulatable T cell engaging antibody or antigen binding fragments of claim 1, wherein Fc domain of any one of the following: human IgG1, human IgG2, human IgG3, human IgG4, or mutants thereof.

14. The bispecific, modulatable T cell engaging antibody or antigen binding fragments of claim 1, wherein the amino acids are selected from 2440, 2448, 2456, or 2464.

15. A polynucleotide encoding the bispecific, modulatable T cell engaging antibody or antigen binding fragments of claim 1.

16. An expression vector comprising a nucleic acid encoding bispecific, modulatable T cell engaging antibody or antigen binding fragments of claim 15.

17. A host cell comprising the vector of claim 16.

18. A method of making a bispecific, modulatable T cell engaging antibody or antigen binding fragments comprising: culturing a cell comprising the polynucleotide of claim 15, in a culture medium, expressing the polynucleotide, and collecting the bispecific, modulatable T cell engaging antibody or antigen binding fragments from the cells or culture medium.

19. A method of treating an antigen-expressing disease in a subject, comprising: administering the bispecific, modulatable T cell engaging antibody or antigen binding fragments of claim 1 to the patient, whereby a cytolytic T cell response to the disease is induced.

20. The method of claim 19, wherein the disease is selected from the disease is an autoimmune disease, an inflammatory disease, an infectious disease, or a cancer.

21. The method of claim 20, wherein the cancer is selected from: acute lymphoblastic leukemia, acute myelogenous leukemia, adrenal glands cancer, bladder cancer, bone marrow cancer, breast cancer, chronic lymphocytic leukemia, chronic myeloid leukemia, central nervous system cancer, colorectal cancer, colorectal carcinoma, endometrial cancer, endometrial carcinoma, gastric cancer, gut carcinoma, head and neck squamous cell carcinoma, hematopoietic malignancies, liver cancer, lung carcinoma, lymph node cancer, melanoma, metastatic colorectal cancer, ovarian cancer, pancreatic adenocarcinoma, pituitary tumor, prostate cancer, prostate carcinoma, renal cell carcinoma, retinal cancer, sarcoma, skin cancer, spleen cancer, stomach cancer, thymus cancer, or thyroid cancer.

22. The method of claim 19, wherein the subject is human.

23. The method of claim 19, wherein a first bispecific antibody or antigen binding fragment having a predetermined activity is used during a first phase of treatment, and a second bispecific antibody or antigen binding fragment having a predetermined activity is used during a second phase of treatment, and optionally using one or more different bispecific antibody or antigen binding fragment having a predetermined activity is used during a first phase of treatment for any additional phases of treatment.

24. A method of selecting an antigen and an anti-CD3 bispecific, modulatable T cell engaging antibody or antigen binding fragments comprising:
selecting an antibody against the antigen;
generating the bispecific, modulatable T cell engaging antibody or antigen binding fragments with at least one anti-CD3 antibody or antigen binding fragments, wherein the anti-CD3 antibody or antigen binding fragments have different T cell activating activities;
contacting the bispecific, modulatable T cell engaging antibody or antigen binding fragments with a T cell under conditions in which the T cell is activated;
measuring the T cell activation; and
selecting the combination of antigen bispecific, modulatable T cell engaging antibody or antigen binding fragments having a predetermined activity level.

25. The method of claim 24, wherein the bispecific antibody comprises an scFV-Fc-ScFv bispecific antibody.

26. The method of claim 24, wherein the bispecific antibody comprises a tandem scFv-scFv-Fc.

27. The method of claim 24, wherein the activity is selected from at least one of: T cell killing, CD8 T cell activation, TNF-alpha secretion, IFN-gamma secretion, IL-2 secretion, IL-10 secretion, antigen binding, or CD3 binding.

28. The method of claim 24, wherein the anti-CD3 antibody or binding fragment thereof are selected from:
a. a heavy chain variable domain (VH) complementarity determining region 1 (CDR1) comprising the amino acid sequence of any one of the following SEQ ID NOs: 1, 11, 21, 31, 41, 51, 61, 71, 81, 91, 101, 111, 121, 131, 141, 151, 161, 171, 181, 191, 201, 211, 221, 231, 241, 251, 261, 271, 281, 291, 301, 311, 321, 331, 341, 351, 361, 371, 381, 391, 401, 411, 421, 431, 441, 451, 461, 471, 481, 491, 501, 511, 521, 531, 541, 551, 561, 571, 581, 591, 601, 611, 621, 631, 641, 651, 661, 671, 681, 691, 701, 711, 721, 731, 741, 751, 761, 771, 781, 791, 801, 811, 821, 831, 841, 851, 861, 871, 881, 891, 901, 911, 921, 931, 941, 951, 961, 971, 981, 991, 1001, 1011, 1021, 1031, 1041, 1051, 1061, 1071, 1081, 1091, 1101, 1111, 1121, 1131, 1141, 1151, 1161, 1171, 1181, 1191, 1201, 1211, 1221, 1231, 1241, 1251, 1261, 1271, 1281, 1291, 1301, 1311, 1321, 1331, 1341, 1351, 1361, 1371, 1381, 1391, 1401, 1411, 1421, 1431, 1441, 1451, 1461, 1471, 1481, 1491, 1501, 1511, 1521, 1531, 1541, 1551, 1561, 1571, 1581, 1591, 1601, 1611, 1621, 1631, 1641, 1651, 1661, 1671, 1681, 1691, 1701, 1711, 1721, 1731, 1741, 1751, 1761, 1771, 1781, 1791, 1801, 1811, 1821, 1831, 1841, 1851, 1861, 1871, 1881, 1891, 1901, 1911, 1916, 1921, 1926, 1931, 1936, 1941, 1946, 1951, 1956, 1961, 1966, 1971, 1976, 1981, 1986, 1991, 1996, 2001, 2006, 2011, 2016, 2021, 2026, 2031, 2036, 2041, 2046, 2051, 2056, 2061, 2066, 2071, 2076, 2081, 2086, 2091, 2096, 2101, 2106, 2111, 2116, 2121, 2126, 2131, 2136, 2141, 2146, 2151, 2156, 2161, 2166, 2171, 2176, 2181, or 2186; and
b. a VH CDR2 comprising the amino acid sequence of any one of the following SEQ ID NOs: 2, 12, 22, 32, 42, 52, 62, 72, 82, 92, 102, 112, 122, 132, 142, 152, 162, 172, 182, 192, 202, 212, 222, 232, 242, 252, 262, 272, 282, 292, 302, 312, 322, 332, 342, 352, 362, 372, 382, 392, 402, 412, 422, 432, 442, 452, 462, 472, 482, 492, 502, 512, 522, 532, 542, 552, 562, 572, 582, 592, 602, 612, 622, 632, 642, 652, 662, 672, 682, 692, 702, 712, 722, 732, 742, 752, 762, 772, 782, 792, 802, 812, 822, 832, 842, 852, 862, 872, 882, 892, 902, 912, 922, 932, 942, 952, 962, 972, 982, 992, 1002, 1012, 1022, 1032, 1042, 1052, 1062, 1072, 1082, 1092, 1102, 1112, 1122, 1132, 1142, 1152, 1162, 1172, 1182, 1192, 1202, 1212, 1222, 1232, 1242, 1252, 1262, 1272, 1282, 1292, 1302, 1312, 1322, 1332, 1342, 1352, 1362, 1372, 1382, 1392, 1402, 1412, 1422, 1432, 1442, 1452, 1462, 1472, 1482, 1492, 1502, 1512, 1522, 1532, 1542, 1552, 1562, 1572, 1582, 1592, 1602, 1612, 1622, 1632, 1642, 1652, 1662, 1672, 1682, 1692, 1702, 1712, 1722, 1732, 1742, 1752, 1762, 1772, 1782, 1792, 1802, 1812, 1822, 1832, 1842, 1852, 1862, 1872, 1882, 1892, 1902, 1912, 1917, 1922, 1927, 1932, 1937, 1942, 1947, 1952, 1957, 1962, 1967, 1972, 1977, 1982, 1987, 1992, 1997, 2002, 2007, 2012, 2017, 2022, 2027, 2032, 2037, 2042, 2047, 2052, 2057, 2062, 2067, 2072, 2077, 2082, 2087, 2092, 2097, 2102, 2107, 2112, 2117, 2122, 2127, 2132, 2137, 2142, 2147, 2152, 2157, 2162, 2167, 2172, 2177, 2182, or 2187; and
c. a VH CDR3 comprising the amino acid sequence of any one of the following SEQ ID NOs: 3, 13, 23, 33, 43, 53, 63, 73, 83, 93, 103, 113, 123, 133, 143, 153, 163, 173, 183, 193, 203, 213, 223, 233, 243, 253, 263, 273, 283, 293, 303, 313, 323, 333, 343, 353, 363, 373, 383, 393, 403, 413, 423, 433, 443, 453, 463, 473, 483, 493, 503, 513, 523, 533, 543, 553, 563, 573, 583, 593, 603, 613, 623, 633, 643, 653, 663, 673, 683, 693, 703, 713, 723, 733, 743, 753, 763, 773, 783, 793, 803, 813, 823, 833, 843, 853, 863, 873, 883, 893, 903, 913, 923, 933, 943, 953, 963, 973, 983, 993, 1003, 1013, 1023, 1033, 1043, 1053, 1063, 1073, 1083, 1093, 1103, 1113, 1123, 1133, 1143, 1153, 1163, 1173, 1183, 1193, 1203, 1213, 1223, 1233, 1243, 1253, 1263, 1273, 1283, 1293, 1303, 1313, 1323, 1333, 1343, 1353, 1363, 1373, 1383, 1393, 1403, 1413, 1423, 1433, 1443, 1453, 1463, 1473, 1483, 1493, 1503, 1513, 1523, 1533, 1543, 1553, 1563, 1573, 1583, 1593, 1603, 1613, 1623, 1633, 1643, 1653, 1663, 1673, 1683, 1693, 1703, 1713, 1723, 1733, 1743, 1753, 1763, 1773, 1783, 1793, 1803, 1813, 1823, 1833, 1843, 1853, 1863, 1873, 1883, 1893, 1903, 1913, 1918, 1923, 1928, 1933, 1938, 1943, 1948, 1953, 1958, 1963, 1968, 1973, 1978, 1983, 1988, 1993, 1998, 2003, 2008, 2013, 2018, 2023, 2028, 2033, 2038, 2043, 2048, 2053, 2058, 2063, 2068, 2073, 2078, 2083, 2088, 2093, 2098, 2103, 2108, 2113, 2118, 2123, 2128, 2133, 2138, 2143, 2148, 2153, 2158, 2163, 2168, 2173, 2178, 2183, or 2188; and
d. a light chain variable domain (VL) CDR1 comprising the amino acid sequence of any one of the following SEQ ID NOs: 6, 16, 26, 36, 46, 56, 66, 76, 86, 96, 106, 116, 126, 136, 146, 156, 166, 176, 186, 196, 206, 216, 226, 236, 246, 256, 266, 276, 286, 296, 306, 316, 326, 336, 346, 356, 366, 376, 386, 396, 406, 416, 426, 436, 446, 456, 466, 476, 486, 496, 506, 516, 526, 536, 546, 556, 566, 576, 586, 596, 606, 616, 626, 636, 646, 656, 666, 676, 686, 696, 706, 716, 726, 736, 746, 756, 766, 776, 786, 796, 806, 816, 826, 836, 846, 856, 866, 876, 886, 896, 906, 916, 926, 936, 946, 956, 966, 976, 986, 996, 1006, 1016, 1026, 1036, 1046, 1056, 1066, 1076, 1086, 1096, 1106, 1116, 1126, 1136, 1146, 1156, 1166, 1176, 1186, 1196, 1206, 1216, 1226, 1236, 1246, 1256, 1266, 1276, 1286, 1296, 1306, 1316, 1326, 1336, 1346, 1356, 1366, 1376, 1386, 1396, 1406, 1416, 1426, 1436, 1446, 1456, 1466, 1476, 1486, 1496, 1506, 1516, 1526, 1536, 1546, 1556, 1566, 1576, 1586, 1596, 1606, 1616, 1626, 1636, 1646, 1656, 1666, 1676, 1686, 1696, 1706, 1716, 1726, 1736, 1746, 1756, 1766, 1776, 1786, 1796, 1806, 1816, 1826, 1836, 1846, 1856, 1866, 1876, 1886, 1896, 1906, 2161, 2166, 2171, 2176, 2181, 2186, 2191, 2196, 2201, 2206, 2211, 2216, 2221, 2226, 2231, 2236, 2241, 2246, 2251, 2256, 2261, 2266, 2271, 2276, 2281, 2286, 2291, 2296, 2301, 2306, 2311, 2316, 2321, 2326, 2331, or 2336; and
e. a VL CDR2 comprising the amino acid sequence of any one of the following SEQ ID NOs: 7, 17, 27, 37, 47, 57, 67, 77, 87, 97, 107, 117, 127, 137, 147, 157, 167, 177, 187, 197, 207, 217, 227, 237, 247, 257, 267, 277, 287, 297, 307, 317, 327, 337, 347, 357, 367, 377, 387, 397, 407, 417, 427, 437, 447, 457, 467, 477, 487, 497, 507, 517, 527, 537, 547, 557, 567, 577, 587, 597, 607, 617, 627, 637, 647, 657, 667, 677, 687, 697, 707, 717, 727, 737, 747, 757, 767, 777, 787, 797, 807, 817, 827, 837, 847, 857, 867, 877, 887, 897, 907, 917, 927, 937, 947, 957, 967, 977, 987, 997, 1007, 1017, 1027, 1037, 1047, 1057, 1067, 1077, 1087, 1097, 1107, 1117, 1127, 1137, 1147, 1157, 1167, 1177, 1187, 1197, 1207, 1217, 1227, 1237, 1247, 1257, 1267, 1277, 1287, 1297, 1307, 1317, 1327, 1337, 1347, 1357, 1367, 1377, 1387, 1397, 1407, 1417, 1427, 1437, 1447, 1457, 1467, 1477, 1487, 1497, 1507, 1517, 1527, 1537, 1547, 1557, 1567, 1577, 1587, 1597, 1607, 1617, 1627, 1637, 1647, 1657, 1667, 1677, 1687, 1697, 1707, 1717, 1727, 1737, 1747, 1757, 1767, 1777, 1787, 1797, 1807, 1817, 1827, 1837, 1847, 1857, 1867, 1877, 1887, 1897, 1907, 2162, 2167, 2172, 2177, 2182, 2187, 2192, 2197, 2202, 2207, 2212, 2217, 2222, 2227, 2232, 2237, 2242, 2247, 2252, 2257, 2262, 2267, 2272, 2277, 2282, 2287, 2292, 2297, 2302, 2307, 2312, 2317, 2322, 2327, 2332, or 2337; and
f. a VL CDR3 comprising the amino acid sequence of any one of the following SEQ ID NOs: 8, 18, 28, 38, 48, 58, 68, 78, 88, 98, 108, 118, 128, 138, 148, 158, 168, 178, 188, 198, 208, 218, 228, 238, 248, 258, 268, 278, 288, 298, 308, 318, 328, 338, 348, 358, 368, 378, 388, 398, 408, 418, 428, 438, 448, 458, 468, 478, 488, 498, 508, 518, 528, 538, 548, 558, 568, 578, 588, 598, 608, 618, 628, 638, 648, 658, 668, 678, 688, 698, 708, 718, 728, 738, 748, 758, 768, 778, 788, 798, 808, 818, 828, 838, 848, 858, 868, 878, 888, 898, 908, 918, 928, 938, 948, 958, 968, 978, 988, 998, 1008, 1018, 1028, 1038, 1048, 1058, 1068, 1078, 1088, 1098, 1108, 1118, 1128, 1138, 1148, 1158, 1168, 1178, 1188, 1198, 1208, 1218, 1228, 1238, 1248, 1258, 1268, 1278, 1288, 1298, 1308, 1318, 1328, 1338, 1348, 1358, 1368, 1378, 1388, 1398, 1408, 1418, 1428, 1438, 1448, 1458, 1468, 1478, 1488, 1498, 1508, 1518, 1528, 1538, 1548, 1558, 1568, 1578, 1588, 1598, 1608, 1618, 1628, 1638, 1648, 1658, 1668, 1678, 1688, 1698, 1708, 1718, 1728, 1738, 1748, 1758, 1768, 1778, 1788, 1798, 1808, 1818, 1828, 1838, 1848, 1858, 1868, 1878, 1888, 1898, 1908, 2163, 2168, 2173, 2178, 2183, 2188, 2193, 2198, 2203, 2208, 2213, 2218, 2223, 2228, 2233, 2238, 2243, 2248, 2253, 2258, 2263, 2268, 2273, 2278, 2283, 2288, 2293, 2298, 2303, 2308, 2313, 2318, 2323, 2328, 2333, or 2338.

29. The method of claim 24, wherein the anti-CD3 antibody or binding fragment thereof comprises:
a. a heavy chain comprising the amino acid sequence of any one of the following SEQ ID NOs: 4, 14, 24, 34, 44, 54, 64, 74, 84, 94, 104, 114, 124, 134, 144, 154, 164, 174, 184, 194, 204, 214, 224, 234, 244, 254, 264, 274, 284, 294, 304, 314, 324, 334, 344, 354, 364, 374, 384, 394, 404, 414, 424, 434, 444, 454, 464, 474, 484, 494, 504, 514, 524, 534, 544, 554, 564, 574, 584, 594, 604, 614, 624, 634, 644, 654, 664, 674, 684, 694, 704, 714, 724, 734, 744, 754, 764, 774, 784, 794, 804, 814, 824, 834, 844, 854, 864, 874, 884, 894, 904, 914, 924, 934, 944, 954, 964, 974, 984, 994, 1004, 1014, 1024, 1034, 1044, 1054, 1064, 1074, 1084, 1094, 1104, 1114, 1124, 1134, 1144, 1154, 1164, 1174, 1184, 1194, 1204, 1214, 1224, 1234, 1244, 1254, 1264, 1274, 1284, 1294, 1304, 1314, 1324, 1334, 1344, 1354, 1364, 1374, 1384, 1394, 1404, 1414, 1424, 1434, 1444, 1454, 1464, 1474, 1484, 1494, 1504, 1514, 1524, 1534, 1544, 1554, 1564, 1574, 1584, 1594, 1604, 1614, 1624, 1634, 1644, 1654, 1664, 1674, 1684, 1694, 1704, 1714, 1724, 1734, 1744, 1754, 1764, 1774, 1784, 1794, 1804, 1814, 1824, 1834, 1844, 1854, 1864, 1874, 1884, 1894, 1904, 1914, 1919, 1924, 1929, 1934, 1939, 1944, 1949, 1954, 1959, 1964, 1969, 1974, 1979, 1984, 1989, 1994, 1999, 2004, 2009, 2014, 2019, 2024, 2029, 2034, 2039, 2044, 2049, 2054, 2059, 2064, 2069, 2074, 2079, 2084, 2089, 2094, 2099, 2104, 2109, 2114, 2119, 2124, 2129, 2134, 2139, 2144, 2149, 2154, 2159, 2164, 2169, 2174, 2179, 2184, or 2189, and
b. a light chain comprising the amino acid sequence of any one of the following SEQ ID NOs: 9, 19, 29, 39, 49, 59, 69, 79, 89, 99, 109, 119, 129, 139, 149, 159, 169, 179, 189, 199, 209, 219, 229, 239, 249, 259, 269, 279, 289, 299, 309, 319, 329, 339, 349, 359, 369, 379, 389, 399, 409, 419, 429, 439, 449, 459, 469, 479, 489, 499, 509, 519, 529, 539, 549, 559, 569, 579, 589, 599, 609, 619, 629, 639, 649, 659, 669, 679, 689, 699, 709, 719, 729, 739, 749, 759, 769, 779, 789, 799, 809, 819, 829, 839, 849, 859, 869, 879, 889, 899, 909, 919, 929, 939, 949, 959, 969, 979, 989, 999, 1009, 1019, 1029, 1039, 1049, 1059, 1069, 1079, 1089, 1099, 1109, 1119, 1129, 1139, 1149, 1159, 1169, 1179, 1189, 1199, 1209, 1219, 1229, 1239, 1249, 1259, 1269, 1279, 1289, 1299, 1309, 1319, 1329, 1339, 1349, 1359, 1369, 1379, 1389, 1399, 1409, 1419, 1429, 1439, 1449, 1459, 1469, 1479, 1489, 1499, 1509, 1519, 1529, 1539, 1549, 1559, 1569, 1579, 1589, 1599, 1609, 1619, 1629, 1639, 1649, 1659, 1669, 1679, 1689, 1699, 1709, 1719, 1729, 1739, 1749, 1759, 1769, 1779, 1789, 1799, 1809, 1819, 1829, 1839, 1849, 1859, 1869, 1879, 1889, 1899, 1909, 2164, 2169, 2174, 2179, 2184, 2189, 2194, 2199, 2204, 2209, 2214, 2219, 2224, 2229, 2234, 2239, 2244, 2249, 2254, 2259, 2264, 2269, 2274, 2279, 2284, 2289, 2294, 2299, 2304, 2309, 2314, 2319, 2324, 2329, 2334, or 2339; or
c. an scFV selected from SEQ ID NOS: 2360; 2368; 2376; 2384; 2392; 2400; 2408; 2416; 2424; or 2432.

30. The method of claim 24, wherein the anti-CD3 antibody or binding fragment thereof is encoded by a nucleic acid that comprises:
a. a VH comprising the nucleic acid sequence of any one of the following SEQ ID NOS: 5, 15, 25, 35, 45, 55, 65, 75, 85, 95, 105, 115, 125, 135, 145, 155, 165, 175, 185, 195, 205, 215, 225, 235, 245, 255, 265, 275, 285, 295, 305, 315, 325, 335, 345, 355, 365, 375, 385, 395, 405, 415, 425, 435, 445, 455, 465, 475, 485, 495, 505, 515, 525, 535, 545, 555, 565, 575, 585, 595, 605, 615, 625, 635, 645, 655, 665, 675, 685, 695, 705, 715, 725, 735, 745, 755, 765, 775, 785, 795, 805, 815, 825, 835, 845, 855, 865, 875, 885, 895, 905, 915, 925, 935, 945, 955, 965, 975, 985, 995, 1005, 1015, 1025, 1035, 1045, 1055, 1065, 1075, 1085, 1095, 1105, 1115, 1125, 1135, 1145, 1155, 1165, 1175, 1185, 1195, 1205, 1215, 1225, 1235, 1245, 1255, 1265, 1275, 1285, 1295, 1305, 1315, 1325, 1335, 1345, 1355, 1365, 1375, 1385, 1395, 1405, 1415, 1425, 1435, 1445, 1455, 1465, 1475, 1485, 1495, 1505, 1515, 1525, 1535, 1545, 1555, 1565, 1575, 1585, 1595, 1605, 1615, 1625, 1635, 1645, 1655, 1665, 1675, 1685, 1695, 1705, 1715, 1725, 1735, 1745, 1755, 1765, 1775, 1785, 1795, 1805, 1815, 1825, 1835, 1845, 1855, 1865, 1875, 1885, 1895, 1905, 1915, 1920, 1925, 1930, 1935, 1940, 1945, 1950, 1955, 1960, 1965, 1970, 1975, 1980, 1985, 1990, 1995, 2000, 2005, 2010, 2015, 2020, 2025, 2030, 2035, 2040, 2045, 2050, 2055, 2060, 2065, 2070, 2075, 2080, 2085, 2090, 2095, 2100, 2105, 2110, 2115, 2120, 2125, 2130, 2135, 2140, 2145, 2150, 2155, 2160, 2165, 2170, 2175, 2180, 2185, or 2190, and
b. a VL comprising the nucleic acid sequence of any one of the following SEQ ID NOs: 10, 20, 30, 40, 50, 60, 70, 80, 90, 100, 110, 120, 130, 140, 150, 160, 170, 180, 190, 200, 210, 220, 230, 240, 250, 260, 270, 280, 290, 300, 310, 320, 330, 340, 350, 360, 370, 380, 390, 400, 410, 420, 430, 440, 450, 460, 470, 480, 490, 500, 510, 520, 530, 540, 550, 560, 570, 580, 590, 600, 610, 620, 630, 640, 650, 660, 670, 680, 690, 700, 710, 720, 730, 740, 750, 760, 770, 780, 790, 800, 810, 820, 830, 840, 850, 860, 870, 880, 890, 900, 910, 920, 930, 940, 950, 960, 970, 980, 990, 1000, 1010, 1020, 1030, 1040, 1050, 1060, 1070, 1080, 1090, 1100, 1110, 1120, 1130, 1140, 1150, 1160, 1170, 1180, 1190, 1200, 1210, 1220, 1230, 1240, 1250, 1260, 1270, 1280, 1290, 1300, 1310, 1320, 1330, 1340, 1350, 1360, 1370, 1380, 1390, 1400, 1410, 1420, 1430, 1440, 1450, 1460, 1470, 1480, 1490, 1500, 1510, 1520, 1530, 1540, 1550, 1560, 1570, 1580, 1590, 1600, 1610, 1620, 1630, 1640, 1650, 1660, 1670, 1680, 1690, 1700, 1710, 1720, 1730, 1740, 1750, 1760, 1770, 1780, 1790, 1800, 1810, 1820, 1830, 1840, 1850, 1860, 1870, 1880, 1890, 1900, 1910, 2165, 2170, 2175, 2180, 2185, 2190, 2195, 2200, 2205, 2210, 2215, 2220, 2225, 2230, 2235, 2240, 2245, 2250, 2255, 2260, 2265, 2270, 2275, 2280, 2285, 2290, 2295, 2300, 2305, 2310, 2315, 2320, 2325, 2330, 2335, or 2340; or
c. a nucleic acid encoding a scFV selected from SEQ ID NOS: 2361; 2369; 2377; 2385; 2393; 2401; 2409; 2417; 2425; or 2433.

31. The method of claim 24, wherein the anti-CD3 antibody or binding fragment thereof comprises:
a heavy chain variable domain (VH) comprising complementarity determining regions CDR1 to CDR3, comprising the amino acid sequence triplets: 1, 2, 3; 11, 12, 13; 21, 22, 23; 31, 32, 33; 41, 42, 43; 51, 52, 53; 61, 62, 63; 71, 72, 73; 81, 82, 83; 91, 92, 93; 101, 102, 103; 111, 112, 113; 121, 122, 123; 131, 132, 133; 141, 142, 143; 151, 152, 153; 161, 162, 163; 171, 172, 173; 181, 182, 183; 191, 192, 193; 201, 202, 203; 211, 212, 213; 221, 222, 223; 231, 232, 233; 241, 242, 243; 251, 252, 253; 261, 262, 263; 271, 272, 273; 281, 282, 283; 291, 292, 293; 301, 302, 303; 311, 312, 313; 321, 322, 323; 331, 332, 333; 341, 342, 343; 351, 352, 353; 361, 362, 363; 371, 372, 373; 381, 382, 383; 391, 392, 393; 401, 402, 403; 411, 412, 413; 421, 422, 423; 431, 432, 433; 441, 442, 443; 451, 452, 453; 461, 462, 463; 471, 472, 473; 481, 482, 483; 491, 492, 493; 501, 502, 503; 511, 512, 513; 521, 522, 523; 531, 532, 533; 541, 542, 543; 551, 552, 553; 561, 562, 563; 571, 572, 573; 581, 582, 583; 591, 592, 593; 601, 602, 603; 611, 612, 613; 621, 622, 623; 631, 632, 633; 641, 642, 643; 651, 652, 653; 661, 662, 663; 671, 672, 673; 681, 682, 683; 691, 692, 693; 701, 702, 703; 711, 712, 713; 721, 722, 723; 731, 732, 733; 741, 742, 743; 751, 752, 753; 761, 762, 763; 771, 772, 773; 781, 782, 783; 791, 792, 793; 801, 802, 803; 811, 812, 813; 821, 822, 823; 831, 832, 833; 841, 842, 843; 851, 852, 853; 861, 862, 863; 871, 872, 873; 881, 882, 883; 891, 892, 893; 901, 902, 903; 911, 912, 913; 921, 922, 923; 931, 932, 933; 941, 942, 943; 951, 952, 953; 961, 962, 963; 971, 972, 973; 981, 982, 983; 991, 992, 993; 1001, 1002, 1003; 1011, 1012, 1013; 1021, 1022, 1023; 1031, 1032, 1033; 1041, 1042, 1043; 1051, 1052, 1053; 1061, 1062, 1063; 1071, 1072, 1073; 1081, 1082, 1083; 1091, 1092, 1093; 1101, 1102, 1103; 1111, 1112, 1113; 1121, 1122, 1123; 1131, 1132, 1133; 1141, 1142, 1143; 1151, 1152, 1153; 1161, 1162, 1163; 1171, 1172, 1173; 1181, 1182, 1183; 1191, 1192, 1193; 1201, 1202, 1203; 1211, 1212, 1213; 1221, 1222, 1223; 1231, 1232, 1233; 1241, 1242, 1243; 1251, 1252, 1253; 1261, 1262, 1263; 1271, 1272, 1273; 1281, 1282, 1283; 1291, 1292, 1293; 1301, 1302, 1303; 1311, 1312, 1313; 1321, 1322, 1323; 1331, 1332, 1333; 1341, 1342, 1343; 1351, 1352, 1353; 1361, 1362, 1363; 1371, 1372, 1373; 1381, 1382, 1383; 1391, 1392, 1393; 1401, 1402, 1403; 1411, 1412, 1413; 1421, 1422, 1423; 1431, 1432, 1433; 1441, 1442, 1443; 1451, 1452, 1453; 1461, 1462, 1463; 1471, 1472, 1473; 1481, 1482, 1483; 1491, 1492, 1493; 1501, 1502, 1503; 1511, 1512, 1513; 1521, 1522, 1523; 1531, 1532, 1533; 1541, 1542, 1543; 1551, 1552, 1553; 1561, 1562, 1563; 1571, 1572, 1573; 1581, 1582, 1583; 1591, 1592, 1593; 1601, 1602, 1603; 1611, 1612, 1613; 1621, 1622, 1623; 1631, 1632, 1633; 1641, 1642, 1643; 1651, 1652, 1653; 1661, 1662, 1663; 1671, 1672, 1673; 1681, 1682, 1683; 1691, 1692, 1693; 1701, 1702, 1703; 1711, 1712, 1713; 1721, 1722, 1723; 1731, 1732, 1733; 1741, 1742, 1743; 1751, 1752, 1753; 1761, 1762, 1763; 1771, 1772, 1773; 1781, 1782, 1783; 1791, 1792, 1793; 1801, 1802, 1803; 1811, 1812, 1813; 1821, 1822, 1823; 1831, 1832, 1833; 1841, 1842, 1843; 1851, 1852, 1853; 1861, 1862, 1863; 1871, 1872, 1873; 1881, 1882, 1883; 1891, 1892, 1893; 1901, 1902, 1903; 1911, 1912, 1913; 1921, 1922, 1923; or 1931, 1932, 1933; and
a light chain variable domain (VL) comprising complementarity determining regions CDR1 to CDR3, comprising the amino acid sequence triplets: 6, 7, 8; 16, 17, 18; 26, 27, 28; 36, 37, 38; 46, 47, 48; 56, 57, 58; 66, 67, 68; 76, 77, 78; 86, 87, 88; 96, 97, 98; 106, 107, 108; 116, 117, 118; 126, 127, 128; 136, 137, 138; 146, 147, 148; 156, 157, 158; 166, 167, 168; 176, 177, 178; 186, 187, 188; 196, 197, 198; 206, 207, 208; 216, 217, 218; 226, 227, 228; 236, 237, 238; 246, 247, 248; 256, 257, 258; 266, 267, 268; 276, 277, 278; 286, 287, 288; 296, 297, 298; 306, 307, 308; 316, 317, 318; 326, 327, 328; 336, 337, 338; 346, 347, 348; 356, 357, 358; 366, 367, 368; 376, 377, 378; 386, 387, 388; 396, 397, 398; 406, 407, 408; 416, 417, 418; 426, 427, 428; 436, 437, 438; 446, 447, 448; 456, 457, 458; 466, 467, 468; 476, 477, 478; 486, 487, 488; 496, 497, 498; 506, 507, 508; 516, 517, 518; 526, 527, 528; 536, 537, 538; 546, 547, 548; 556, 557, 558; 566, 567, 568; 576, 577, 578; 586, 587, 588; 596, 597, 598; 606, 607, 608; 616, 617, 618; 626, 627, 628; 636, 637, 638; 646, 647, 648; 656, 657, 658; 666, 667, 668; 676, 677, 678; 686, 687, 688; 696, 697, 698; 706, 707, 708; 716, 717, 718; 726, 727, 728; 736, 737, 738; 746, 747, 748; 756, 757, 758; 766, 767, 768; 776, 777, 778; 786, 787, 788; 796, 797, 798; 806, 807, 808; 816, 817, 818; 826, 827, 828; 836, 837, 838; 846, 847, 848; 856, 857, 858; 866, 867, 868; 876, 877, 878; 886, 887, 888; 896, 897, 898; 906, 907, 908; 916, 917, 918; 926, 927, 928; 936, 937, 938; 946, 947, 948; 956, 957, 958; 966, 967, 968; 976, 977, 978; 986, 987, 988; 996, 997, 998; 1006, 1007, 1008; 1016, 1017, 1018; 1026, 1027, 1028; 1036, 1037, 1038; 1046, 1047, 1048; 1056, 1057, 1058; 1066, 1067, 1068; 1076, 1077, 1078; 1086, 1087, 1088; 1096, 1097, 1098; 1106, 1107, 1108; 1116, 1117, 1118; 1126, 1127, 1128; 1136, 1137, 1138; 1146, 1147, 1148; 1156, 1157, 1158; 1166, 1167, 1168; 1176, 1177, 1178; 1186, 1187, 1188; 1196, 1197, 1198; 1206, 1207, 1208; 1216, 1217, 1218; 1226, 1227, 1228; 1236, 1237, 1238; 1246, 1247, 1248; 1256, 1257, 1258; 1266, 1267, 1268; 1276, 1277, 1278; 1286, 1287, 1288; 1296, 1297, 1298; 1306, 1307, 1308; 1316, 1317, 1318; 1326, 1327, 1328; 1336, 1337, 1338; 1346, 1347, 1348; 1356, 1357, 1358; 1366, 1367, 1368; 1376, 1377, 1378; 1386, 1387, 1388; 1396, 1397, 1398; 1406, 1407, 1408; 1416, 1417, 1418; 1426, 1427, 1428; 1436, 1437, 1438; 1446, 1447, 1448; 1456, 1457, 1458; 1466, 1467, 1468; 1476, 1477, 1478; 1486, 1487, 1488; 1496, 1497, 1498; 1506, 1507, 1508; 1516, 1517, 1518; 1526, 1527, 1528; 1536, 1537, 1538; 1546, 1547, 1548; 1556, 1557, 1558; 1566, 1567, 1568; 1576, 1577, 1578; 1586, 1587, 1588; 1596, 1597, 1598; 1606, 1607, 1608; 1616, 1617, 1618; 1626, 1627, 1628; 1636, 1637, 1638; 1646, 1647, 1648; 1656, 1657, 1658; 1666, 1667, 1668; 1676, 1677, 1678; 1686, 1687, 1688; 1696, 1697, 1698; 1706, 1707, 1708; 1716, 1717, 1718; 1726, 1727, 1728; 1736, 1737, 1738; 1746, 1747, 1748; 1756, 1757, 1758; 1766, 1767, 1768; 1776, 1777, 1778; 1786, 1787, 1788; 1796, 1797, 1798; 1806, 1807, 1808; 1816, 1817, 1818; 1826, 1827, 1828; 1836, 1837, 1838; 1846, 1847, 1848; 1856, 1857, 1858; 1866, 1867, 1868; 1876, 1877, 1878; 1886, 1887, 1888; 1896, 1897, 1898; 1906, 1907, 1908; 1916, 1917, 1918; 1926, 1927, 1928; or 1936, 1937, 1938; or
CDRs in scFvs of SEQ ID NO: 2360; 2368; 2376; 2384; 2392; 2400; 2408; 2416; 2424; or 2432.

32. The method of claim 24, wherein the anti-CD3 antibody or binding fragment thereof comprises:
a heavy chain variable domain (VH) comprising complementarity determining regions CDR1 to CDR3, comprising the amino acid sequence triplets: 1941, 1942, 1943; 1946, 1947, 1948; 1951, 1952, 1953; 1956, 1957, 1958; 1961, 1962, 1963; 1966, 1967, 1968; 1971, 1972, 1973; 1976, 1977, 1978; 1981, 1982, 1983; 1986, 1987, 1988; 1991, 1992, 1993; 1996, 1997, 1998; 2001, 2002, 2003; 2006, 2007, 2008; 2011, 2012, 2013; 2016, 2017, 2018; 2021, 2022, 2023; 2026, 2027, 2028; 2031, 2032, 2033; 2036, 2037, 2038; 2041, 2042, 2043; 2046, 2047, 2048; 2051, 2052, 2053; 2056, 2057, 2058; 2061, 2062, 2063; 2066, 2067, 2068; 2071, 2072, 2073; 2076, 2077, 2078; 2081, 2082, 2083; 2086, 2087, 2088; 2091, 2092, 2093; 2096, 2097, 2098; 2101, 2102, 2103; 2106, 2107, 2108; 2111, 2112, 2113; 2116, 2117, 2118; 2121, 2122, 2123; 2126, 2127, 2128; 2131, 2132, 2133; 2136, 2137, 2138; 2141, 2142, 2143; 2146, 2147, 2148; 2151, 2152, 2153; 2156, 2157, 2158; 2161, 2162, 2163; 2166, 2167, 2168; 2171, 2172, 2173; 2176, 2177, 2178; 2181, 2182, 2183; or 2186, 2187, 2188; and
a light chain variable domain (VL) comprising complementarity determining regions CDR1 to CDR3, comprising the amino acid sequence triplets: 2191, 2192, 2193; 2196, 2197, 2198; 2201, 2202, 2203; 2206, 2207, 2208; 2211, 2212, 2213; 2216, 2217, 2218; 2221, 2222, 2223; 2226, 2227, 2228; 2231, 2232, 2233; 2236, 2237, 2238; 2241, 2242, 2243; 2246, 2247, 2248; 2251, 2252, 2253; 2256, 2257, 2258; 2261, 2262, 2263; 2266, 2267, 2268; 2271, 2272, 2273; 2276, 2277, 2278; 2281, 2282, 2283; 2286, 2287, 2288; 2291, 2292, 2293; 2296, 2297, 2298; 2301, 2302, 2303; 2306, 2307, 2308; 2311, 2312, 2313; 2316, 2317, 2318; 2321, 2322, 2323; 2326, 2327, 2328; 2331, 2332, 2333; or 2336, 2337, 2338 or
2336, 2337, 2338; 2360; 2368; 2376; 2384; 2392; 2400; 2408; 2416; 2424; or 2432.

33. The method of claim 24, wherein the antigen or a tumor associated antigen is selected from 4-1BBL, AFP, AKAP-4, ALK, androgen receptor, bcr-abl, C1orf186, CA-125, CA6, CA6, CA19-9, CAMPATH-1, Carbonic anhydrase IX, carcinoembryonic antigen (CEA), CCR8, CD1, CD2, CD3, CD4, CD5, CD8, CD16A, CD19, CD1A, CD20, CD204, CD204, CD204, CD206, CD206, CD206, CD25, CD276, CD28, CD30, CD301, CD301, CD32A, CD32B, CD33, CD36, CD37, CD39, CD40, CD45, CD47, CD5, CD64, CD73, CEA, CLEC4C, CLDN16, CLDN6, CLDN18.2, CLEC10A, CLEC12A, CLEC5A, CLEC9A, CMET, CTCFL, cyclin B1, CYP1B1, DC-SIGN, DEC-205, Dectin1, Dectin2, DLL3, EGFR, EGFRvIII, Endoglin, endosialin, EPCAM, EphA2, epidermal growth factor, ERG, ETV6-AML, ferritin, fibroblast activation protein (FAP), FLT3, folate-binding protein, Fos-related antigen 1, FRA, fucosyl GM1, G250, GD2, GD3, Glycoprotein A33, GloboH, GLP-3, GM2, GM3, gp100, HER2, HER2/neu, HER3, HLD-DR, HMWMAA, HPV E6, HPV E7, hTERT, HVEM, IL-2 receptor, IV1, Latent-TGFB, LCK, Legumain, Ley, LIV1, LMP2, LY6E, MAD-CT-1, MAD-CT-2, MAGE A1, MAGE A3, mannose scavenger receptor1, MARCO, MelanA/MARTI, mesothelin (MSLN), metalloproteinase, ML-IAP, MSLN, MUC1, MUC15, MUC16, MYCN, myostatin, NA17, NAPI2B, NAPI2B, NY-BR-1, NY-ESO-1, OX40L, OY-TES1, p185HER2, P53 mutant, P53 nonmutant, PAGE4, PAP, PAX3, PAX5, PDGFR-B, PDL, PDL1, PLAV1, polysialic acid, PR1, PSA, PSCA, PSMA, PTK7, Ras mutant, RGS5, RhoC, RON, ROR1, ROR2, RRC15, SART3, SIRPA, Sperm protein 17, SSX2, STn, survivin, TAG-72, tenascin, TGFB, Tic 3, TMEM238, TMPRSS3, TMPRSS4, Tn, TRA6, TROP2, TRP-2, tyrosinase, UPK1B, vascular endothelial growth factor, VEGFR, VEGFR2, VISTA, VTCN1, WT1, XAGE 1, or Y6E.

34. The method of claim 24, wherein the bispecific, modulatable T cell engaging antibody or antigen binding fragments has a binding or activation that differs from the following antibodies: ABT806 (EGFRvIII), adecatumumab (EPCAM), alemtuzumab (CD33), AMG595 (EGFRvIII), anetumab (MSLN), anti-ACE2, anti-EphA2 (EphA2), anti-hyaluronidase, anti-neuraminidase, anti-NY-ESO-1, anti-PTK7 (PTK7), cetuximab (EGFR), cirmtuzumab (ROR1), clivatuzumab (MUC1), CT-011 (PD1), DS-8895a variant 1 (EphA2), DS-8895a variant 2 (EphA2), durvalumab (PDL1) anti-MAGE-A3, edrecolomab (EPCAM), farletuzumab (FRA/folate receptor alpha), Gemtuzumab ozogamicin (CD33), huDS6 (CA6), humanized Ab 2-3 (CEA), humanized PR1A3 (CEA), ibritumomab tiuxetan (CD52), IMAB362/claudiximab (Claudin 18.2), ipilimumab (CTLA4), J591 variant 1 (PSMA), J591 variant 2 (PSMA), ladiratuzumab (LIV1), lifastuzumab (NAPI2B), MEDI-547 (EphA2), mirvetuximab (FRA), narnatumab (RON), nimotuzumab (EGFR), nivolumab (PD1), onartuzumab (c-MET), panitumumab (EGFR), patritumab (HER3), pembrolizumab (PD1), pertuzumab (HER2/neu), PF-06647020 (PTK7), RG7841 (LY6E), rituximab (CD20), rovalpituzumab (DLL3), sacituzumab (TROP2), sibrotuzumab (FAP), sofituzumab (MUC16), tositumomab (CD20), trastuzumab (HER2/neu), tremelimumab (CP-675,206) (CTLA4), zalutumumab (EGFR), or bispecific antibody or antigen binding fragments thereof.

The application's sequence listing, which the Patent Office published only in electronic form, follows.

SEQUENCE LISTING (2499 sequences)

SEQ ID NO: 1 - protein, 10 aa, synthetic construct
GVSLSSRDYS

SEQ ID NO: 2 - protein, 8 aa, synthetic construct
FTPIFGTV

SEQ ID NO: 3 - protein, 11 aa, synthetic construct
ARGGHWNPFDP

SEQ ID NO: 4 - protein, 120 aa, synthetic construct
EVQLVQSGSELKKPGSSVKVSCKASGVSLSSRDYSISWVRQAPGQGLEWLGSFTPIFGTVTYAQKFQGRVTITADKSTSTAFMELTSLRSEDTAIYYCARGGHWNPFDPWGQGTLVTVSS

SEQ ID NO: 5 - DNA, 360 bp, synthetic construct
  source 1..360: mol_type = other DNA
gaagttcaattagttcaatctggttctgaattaaaaaaacctggttcttctgttaaagtttcttgtaaagcttctggtgtttctttatcttctcgtgattattctatttcttgggttcgtcaagctcctggtcaaggtttagaatggttaggttcttttactcctatttttggtactgttacttatgctcaaaaatttcaaggtcgtgttactattactgctgataaatctacttctactgcttttatggaattaacttctttacgttctgaagatactgctatttattattgtgctcgtggtggtcattggaatccttttgatccttggggtcaaggtactttagttactgtttcttct

SEQ ID NO: 6 - protein, 6 aa, synthetic construct
QSISSY

SEQ ID NO: 7 - skipped

SEQ ID NO: 8 - protein, 9 aa, synthetic construct
QQSYSTPPT

SEQ ID NO: 9 - protein, 107 aa, synthetic construct
DIQMTQSPSSLSASVGDRVTITCRASQSISSYLNWYQQKPGKAPKLLIYAASSLQSGVPSRFSGSGSGTDFTLTISSLQPEDFATYYCQQSYSTPPTFGQGTKVEIK

SEQ ID NO: 10 - DNA, 321 bp, synthetic construct
  source 1..321: mol_type = other DNA
gatattcaaatgactcaatctccttcttctttatctgcttctgttggtgatcgtgttactattacttgtcgtgcttctcaatctatttcttcttatttaaattggtatcaacaaaaacctggtaaagctcctaaattattaatttatgctgcttcttctttacaatctggtgttccttctcgtttttctggttctggttctggtactgattttactttaactatttcttctttacaacctgaagattttgctacttattattgtcaacaatcttattctactcctcctacttttggtcaaggtactaaagttgaaattaaa

SEQ ID NO: 11 - protein, 10 aa, synthetic construct
GVTFNSRTFT

SEQ ID NO: 12 - protein, 8 aa, synthetic construct
IIPIFGTI

SEQ ID NO: 13 - protein, 11 aa, synthetic construct
ARGGHWNPFDY

SEQ ID NO: 14 - protein, 120 aa, synthetic construct
EVQLVQSGSELKKPGSSVKVSCKASGVTFNSRTFTISWVRQAPGQGLEWLGSIIPIFGTITYAQKFQGRVTITADKSTSTAFMELTSLRSEDTAIYYCARGGHWNPFDYWGQGTLVTVSS

SEQ ID NO: 15 - DNA, 360 bp, synthetic construct
  source 1..360: mol_type = other DNA
gaagttcaattagttcaatctggttctgaattaaaaaaacctggttcttctgttaaagtttcttgtaaagcttctggtgttacttttaattctcgtacttttactatttcttgggttcgtcaagctcctggtcaaggtttagaatggttaggttctattattcctatttttggtactattacttatgctcaaaaatttcaaggtcgtgttactattactgctgataaatctacttctactgcttttatggaattaacttctttacgttctgaagatactgctatttattattgtgctcgtggtggtcattggaatccttttgattattggggtcaaggtactttagttactgtttcttct

SEQ ID NO: 16 - protein, 6 aa, synthetic construct
QSISSY

SEQ ID NO: 17 - skipped

SEQ ID NO: 18 - protein, 9 aa, synthetic construct
QQSYSTPPT

SEQ ID NO: 19 - protein, 107 aa, synthetic construct; identical to SEQ ID NO: 9

SEQ ID NO: 20 - DNA, 321 bp, synthetic construct; identical to SEQ ID NO: 10
  source 1..321: mol_type = other DNA

SEQ ID NO: 21 - protein, 10 aa, synthetic construct
GVSLSSRDYS

SEQ ID NO: 22 - protein, 8 aa, synthetic construct
IIPVFGSL

SEQ ID NO: 23 - protein, 11 aa, synthetic construct
ARGGHWNPFDP

SEQ ID NO: 24 - protein, 120 aa, synthetic construct
EVQLVQSGSELKKPGSSVKVSCKASGVSLSSRDYSISWVRQAPGQGLEWLGSIIPVFGSLTYAQKFQGRVTITADKSTSTAFMELTSLRSEDTAIYYCARGGHWNPFDPWGQGTLVTVSS

SEQ ID NO: 25 - DNA, 360 bp, synthetic construct
  source 1..360: mol_type = other DNA
gaagttcaattagttcaatctggttctgaattaaaaaaacctggttcttctgttaaagtttcttgtaaagcttctggtgtttctttatcttctcgtgattattctatttcttgggttcgtcaagctcctggtcaaggtttagaatggttaggttctattattcctgtttttggttctttaacttatgctcaaaaatttcaaggtcgtgttactattactgctgataaatctacttctactgcttttatggaattaacttctttacgttctgaagatactgctatttattattgtgctcgtggtggtcattggaatccttttgatccttggggtcaaggtactttagttactgtttcttct

SEQ ID NO: 26 - protein, 6 aa, synthetic construct
QSIGSY

SEQ ID NO: 27 - skipped

SEQ ID NO: 28 - protein, 9 aa, synthetic construct
QQSYSTPPT

SEQ ID NO: 29 - protein, 107 aa, synthetic construct
DIQMTQSPSSLSASVGDRVTITCRASQSIGSYLNWYQQKPGKAPKLLIYSASSLQSGVPSRFSGSGSGTDFTLTISSLQPEDFATYYCQQSYSTPPTFGQGTKVEIK

SEQ ID NO: 30 - DNA, 321 bp, synthetic construct
  source 1..321: mol_type = other DNA
gatattcaaatgactcaatctccttcttctttatctgcttctgttggtgatcgtgttactattacttgtcgtgcttctcaatctattggttcttatttaaattggtatcaacaaaaacctggtaaagctcctaaattattaatttattctgcttcttctttacaatctggtgttccttctcgtttttctggttctggttctggtactgattttactttaactatttcttctttacaacctgaagattttgctacttattattgtcaacaatcttattctactcctcctacttttggtcaaggtactaaagttgaaattaaa

SEQ ID NO: 31 - protein, 10 aa, synthetic construct
GVSLSSRDYS

SEQ ID NO: 32 - protein, 8 aa, synthetic construct
FTPIFGTV

SEQ ID NO: 33 - protein, 11 aa, synthetic construct
ARGGHWNPFDP

SEQ ID NO: 34 - protein, 120 aa, synthetic construct; identical to SEQ ID NO: 4

SEQ ID NO: 35 - DNA, 360 bp, synthetic construct; identical to SEQ ID NO: 5
  source 1..360: mol_type = other DNA

SEQ ID NO: 36 - protein, 6 aa, synthetic construct
QSIGSY

SEQ ID NO: 37 - skipped

SEQ ID NO: 38 - protein, 9 aa, synthetic construct
QQSYSTPPT

SEQ ID NO: 39 - protein, 107 aa, synthetic construct; identical to SEQ ID NO: 29

SEQ ID NO: 40 - DNA, 321 bp, synthetic construct; identical to SEQ ID NO: 30
  source 1..321: mol_type = other DNA

SEQ ID NO: 41 - protein, 10 aa, synthetic construct
GVTFNSRTFT

SEQ ID NO: 42 - protein, 8 aa, synthetic construct
FTPIFGTV

SEQ ID NO: 43 - protein, 11 aa, synthetic construct
TRRGNWNPFDP

SEQ ID NO: 44 - protein, 120 aa, synthetic construct
EVQLVQSGSELKKPGSSVKVSCKASGVTFNSRTFTISWVRQAPGQGLEWLGSFTPIFGTVTYAQKFQGRVTITADKSTSTAFMELTSLRSEDTAIYYCTRRGNWNPFDPWGQGTLVTVSS

SEQ ID NO: 45 - DNA, 360 bp, synthetic construct
  source 1..360: mol_type = other DNA
gaagttcaattagttcaatctggttctgaattaaaaaaacctggttcttctgttaaagtttcttgtaaagcttctggtgttacttttaattctcgtacttttactatttcttgggttcgtcaagctcctggtcaaggtttagaatggttaggttcttttactcctatttttggtactgttacttatgctcaaaaatttcaaggtcgtgttactattactgctgataaatctacttctactgcttttatggaattaacttctttacgttctgaagatactgctatttattattgtactcgtcgtggtaattggaatccttttgatccttggggtcaaggtactttagttactgtttcttct

SEQ ID NO: 46 - protein, 6 aa, synthetic construct
QSISSY

SEQ ID NO: 47 - skipped

SEQ ID NO: 48 - protein, 9 aa, synthetic construct
QQSYSTPPT

SEQ ID NO: 49 - protein, 107 aa, synthetic construct; identical to SEQ ID NO: 9

SEQ ID NO: 50 - DNA, 321 bp, synthetic construct; identical to SEQ ID NO: 10
  source 1..321: mol_type = other DNA

SEQ ID NO: 51 - protein, 10 aa, synthetic construct
GFTFTSRGVS

SEQ ID NO: 52 - protein, 8 aa, synthetic construct
IIPIFGTI

SEQ ID NO: 53 - protein, 11 aa, synthetic construct
ARGGNWNQFDY

SEQ ID NO: 54 - protein, 120 aa, synthetic construct
EVQLVQSGSELKKPGSSVKVSCKASGFTFTSRGVSISWVRQAPGQGLEWLGSIIPIFGTITYAQKFQGRVTITADKSTSTAFMELTSLRSEDTAIYYCARGGNWNQFDYWGQGTLVTVSS

SEQ ID NO: 55 - DNA, 360 bp, synthetic construct
  source 1..360: mol_type = other DNA
gaagttcaattagttcaatctggttctgaattaaaaaaacctggttcttctgttaaagtttcttgtaaagcttctggttttacttttacttctcgtggtgtttctatttcttgggttcgtcaagctcctggtcaaggtttagaatggttaggttctattattcctatttttggtactattacttatgctcaaaaatttcaaggtcgtgttactattactgctgataaatctacttctactgcttttatggaattaacttctttacgttctgaagatactgctatttattattgtgctcgtggtggtaattggaatcaatttgattattggggtcaaggtactttagttactgtttcttct

SEQ ID NO: 56 - protein, 6 aa, synthetic construct
QSISSY

SEQ ID NO: 57 - skipped

SEQ ID NO: 58 - protein, 9 aa, synthetic construct
QQSYSTPPT

SEQ ID NO: 59 - protein, 107 aa, synthetic construct; identical to SEQ ID NO: 9

SEQ ID NO: 60 - DNA, 321 bp, synthetic construct; identical to SEQ ID NO: 10
  source 1..321: mol_type = other DNA

SEQ ID NO: 61 - protein, 10 aa, synthetic construct
GFTFTSRGVS

SEQ ID NO: 62 - protein, 8 aa, synthetic construct
IIPIFGTI

SEQ ID NO: 63 - protein, 11 aa, synthetic construct
TRRGNWNPFEN

SEQ ID NO: 64 - protein, 120 aa, synthetic construct
EVQLVQSGSELKKPGSSVKVSCKASGFTFTSRGVSISWVRQAPGQGLEWLGSIIPIFGTITYAQKFQGRVTITADKSTSTAFMELTSLRSEDTAIYYCTRRGNWNPFENWGQGTLVTVSS

SEQ ID NO: 65 - DNA, 360 bp, synthetic construct
  source 1..360: mol_type = other DNA
gaagttcaattagttcaatctggttctgaattaaaaaaacctggttcttctgttaaagtttcttgtaaagcttctggttttacttttacttctcgtggtgtttctatttcttgggttcgtcaagctcctggtcaaggtttagaatggttaggttctattattcctatttttggtactattacttatgctcaaaaatttcaaggtcgtgttactattactgctgataaatctacttctactgcttttatggaattaacttctttacgttctgaagatactgctatttattattgtactcgtcgtggtaattggaatccttttgaaaattggggtcaaggtactttagttactgtttcttct

SEQ ID NO: 66 - protein, 6 aa, synthetic construct
QSISSY

SEQ ID NO: 67 - skipped

SEQ ID NO: 68 - protein, 9 aa, synthetic construct
QQSYSTPPT

SEQ ID NO: 69 - protein, 107 aa, synthetic construct; identical to SEQ ID NO: 9

SEQ ID NO: 70 - DNA, 321 bp, synthetic construct; identical to SEQ ID NO: 10
  source 1..321: mol_type = other DNA

SEQ ID NO: 71 - protein, 10 aa, synthetic construct
GVTFNSRTFT

SEQ ID NO: 72 - protein, 8 aa, synthetic construct
IIPIFGTI

SEQ ID NO: 73 - protein, 11 aa, synthetic construct
ARGGHWNPFDP

SEQ ID NO: 74 - protein, 120 aa, synthetic construct
EVQLVQSGSELKKPGSSVKVSCKASGVTFNSRTFTISWVRQAPGQGLEWLGSIIPIFGTITYAQKFQGRVTITADKSTSTAFMELTSLRSEDTAIYYCARGGHWNPFDPWGQGTLVTVSS

SEQ ID NO: 75 - DNA, 360 bp, synthetic construct
  source 1..360: mol_type = other DNA
gaagttcaattagttcaatctggttctgaattaaaaaaacctggttcttctgttaaagtttcttgtaaagcttctggtgttacttttaattctcgtacttttactatttcttgggttcgtcaagctcctggtcaaggtttagaatggttaggttctattattcctatttttggtactattacttatgctcaaaaatttcaaggtcgtgttactattactgctgataaatctacttctactgcttttatggaattaacttctttacgttctgaagatactgctatttattattgtgctcgtggtggtcattggaatccttttgatccttggggtcaaggtactttagttactgtttcttct

SEQ ID NO: 76 - protein, 6 aa, synthetic construct
QSISSY

SEQ ID NO: 77 - skipped

SEQ ID NO: 78 - protein, 9 aa, synthetic construct
QQSYSTPPT

SEQ ID NO: 79 - protein, 107 aa, synthetic construct; identical to SEQ ID NO: 9

SEQ ID NO: 80 - DNA, 321 bp, synthetic construct; identical to SEQ ID NO: 10
  source 1..321: mol_type = other DNA

SEQ ID NO: 81 - protein, 10 aa, synthetic construct
GVTFNSRTFT

SEQ ID NO: 82 - protein, 8 aa, synthetic construct
IIPIFGTI

SEQ ID NO: 83 - protein, 11 aa, synthetic construct
TRRGNWNPFDP

SEQ ID NO: 84 - protein, 120 aa, synthetic construct
EVQLVQSGSELKKPGSSVKVSCKASGVTFNSRTFTISWVRQAPGQGLEWLGSIIPIFGTITYAQKFQGRVTITADKSTSTAFMELTSLRSEDTAIYYCTRRGNWNPFDPWGQGTLVTVSS

SEQ ID NO: 85 - DNA, 360 bp, synthetic construct
  source 1..360: mol_type = other DNA
gaagttcaattagttcaatctggttctgaattaaaaaaacctggttcttctgttaaagtttcttgtaaagcttctggtgttacttttaattctcgtacttttactatttcttgggttcgtcaagctcctggtcaaggtttagaatggttaggttctattattcctatttttggtactattacttatgctcaaaaatttcaaggtcgtgttactattactgctgataaatctacttctactgcttttatggaattaacttctttacgttctgaagatactgctatttattattgtactcgtcgtggtaattggaatccttttgatccttggggtcaaggtactttagttactgtttcttct

SEQ ID NO: 86 - protein, 6 aa, synthetic construct
QSISSY

SEQ ID NO: 87 - skipped

SEQ ID NO: 88 - protein, 9 aa, synthetic construct
QQGYSSPAT

SEQ ID NO: 89 - protein, 107 aa, synthetic construct
DIQMTQSPSSLSASVGDRVTITCRASQSISSYLNWYQQKPGKAPKLLIYAASSLQSGVPSRFSGSGSGTDFTLTISSLQPEDFATYYCQQGYSSPATFGQGTKVEIK

SEQ ID NO: 90 - DNA, 321 bp, synthetic construct
  source 1..321: mol_type = other DNA
gatattcaaatgactcaatctccttcttctttatctgcttctgttggtgatcgtgttactattacttgtcgtgcttctcaatctatttcttcttatttaaattggtatcaacaaaaacctggtaaagctcctaaattattaatttatgctgcttcttctttacaatctggtgttccttctcgtttttctggttctggttctggtactgattttactttaactatttcttctttacaacctgaagattttgctacttattattgtcaacaaggttattcttctcctgctacttttggtcaaggtactaaagttgaaattaaa

SEQ ID NO: 91 - protein, 10 aa, synthetic construct
GVSLSSRDYS

SEQ ID NO: 92 - protein, 8 aa, synthetic construct
IIPVFGSL

SEQ ID NO: 93 - protein, 11 aa, synthetic construct
ARGGHWNPFDP

SEQ ID NO: 94 - protein, 120 aa, synthetic construct; identical to SEQ ID NO: 24

SEQ ID NO: 95 - DNA, 360 bp, synthetic construct; identical to SEQ ID NO: 25
  source 1..360: mol_type = other DNA

SEQ ID NO: 96 - protein, 6 aa, synthetic construct
QSVSSG

SEQ ID NO: 97 - skipped

SEQ ID NO: 98 - protein, 9 aa, synthetic construct
QQSYSTLPT

SEQ ID NO: 99 - protein, 107 aa, synthetic construct
DIQMTQSPSSLSASVGDRVTITCRASQSVSSGLNWYQQKPGKAPKLLIYAASSLQSGVPSRFSGSGSGTDFTLTISSLQPEDFATYYCQQSYSTLPTFGQGTKVEIK

SEQ ID NO: 100 - DNA, 321 bp, synthetic construct
  source 1..321: mol_type = other DNA
gatattcaaatgactcaatctccttcttctttatctgcttctgttggtgatcgtgttactattacttgtcgtgcttctcaatctgtttcttctggtttaaattggtatcaacaaaaacctggtaaagctcctaaattattaatttatgctgcttcttctttacaatctggtgttccttctcgtttttctggttctggttctggtactgattttactttaactatttcttctttacaacctgaagattttgctacttattattgtcaacaatcttattctactttacctacttttggtcaaggtactaaagttgaaattaaa

SEQ ID NO: 101 - protein, 10 aa, synthetic construct
GVSLSSRDYS

SEQ ID NO: 102 - protein, 8 aa, synthetic construct
FTPIFGTV

SEQ ID NO: 103 - protein, 11 aa, synthetic construct
ARGGHWNPFDP

SEQ ID NO: 104 - protein, 120 aa, synthetic construct; identical to SEQ ID NO: 4

SEQ ID NO: 105 - DNA, 360 bp, synthetic construct; identical to SEQ ID NO: 5
  source 1..360: mol_type = other DNA

SEQ ID NO: 106 - protein, 6 aa, synthetic construct
QTVSAY

SEQ ID NO: 107 - skipped

SEQ ID NO: 108 - protein, 9 aa, synthetic construct
QQSYSGPPT

SEQ ID NO: 109 - protein, 107 aa, synthetic construct
DIQMTQSPSSLSASVGDRVTITCRASQTVSAYLNWYQQKPGKAPKLLIYVSSSLQSGVPSRFSGSGSGTDFTLTISSLQPEDFATYYCQQSYSGPPTFGQGTKVEIK

SEQ ID NO: 110 - DNA, 321 bp, synthetic construct
  source 1..321: mol_type = other DNA
gatattcaaatgactcaatctccttcttctttatctgcttctgttggtgatcgtgttactattacttgtcgtgcttctcaaactgtttctgcttatttaaattggtatcaacaaaaacctggtaaagctcctaaattattaatttatgtttcttcttctttacaatctggtgttccttctcgtttttctggttctggttctggtactgattttactttaactatttcttctttacaacctgaagattttgctacttattattgtcaacaatcttattctggtcctcctacttttggtcaaggtactaaagttgaaattaaa

SEQ ID NO: 111 - protein, 10 aa, synthetic construct
GFTFTSRGVS

SEQ ID NO: 112 - protein, 8 aa, synthetic construct
IIPIFGTI

SEQ ID NO: 113 - protein, 11 aa, synthetic construct
TRRGNWNPFEN

SEQ ID NO: 114 - protein, 120 aa, synthetic construct; identical to SEQ ID NO: 64

SEQ ID NO: 115 - DNA, 360 bp, synthetic construct; identical to SEQ ID NO: 65
  source 1..360: mol_type = other DNA

SEQ ID NO: 116 - protein, 6 aa, synthetic construct
QSVSSG

SEQ ID NO: 117 - skipped

SEQ ID NO: 118 - protein, 9 aa, synthetic construct
QQSYSTPPT

SEQ ID NO: 119 - protein, 107 aa, synthetic construct
DIQMTQSPSSLSASVGDRVTITCRASQSVSSGLNWYQQKPGKAPKLLIYDASSLQSGVPSRFSGSGSGTDFTLTISSLQPEDFATYYCQQSYSTPPTFGQGTKVEIK

SEQ ID NO: 120 - DNA, 321 bp, synthetic construct
  source 1..321: mol_type = other DNA
gatattcaaatgactcaatctccttcttctttatctgcttctgttggtgatcgtgttactattacttgtcgtgcttctcaatctgtttcttctggtttaaattggtatcaacaaaaacctggtaaagctcctaaattattaatttatgatgcttcttctttacaatctggtgttccttctcgtttttctggttctggttctggtactgattttactttaactatttcttctttacaacctgaagattttgctacttattattgtcaacaatcttattctactcctcctacttttggtcaaggtactaaagttgaaattaaa

SEQ ID NO: 121 - protein, 10 aa, synthetic construct
GFTFTSRGVS

SEQ ID NO: 122 - protein, 8 aa, synthetic construct
IIPIFGTI

SEQ ID NO: 123 - protein, 11 aa, synthetic construct
TRRGNWNPFEN

SEQ ID NO: 124 - protein, 120 aa, synthetic construct; identical to SEQ ID NO: 64

SEQ ID NO: 125 - DNA, 360 bp, synthetic construct; identical to SEQ ID NO: 65
  source 1..360: mol_type = other DNA

SEQ ID NO: 126 - protein, 6 aa, synthetic construct
QTVSAY

SEQ ID NO: 127 - skipped

SEQ ID NO: 128 - protein, 9 aa, synthetic construct
QQSYSGPPT

SEQ ID NO: 129 - protein, 107 aa, synthetic construct; identical to SEQ ID NO: 109

SEQ ID NO: 130 - DNA, 321 bp, synthetic construct; identical to SEQ ID NO: 110
  source 1..321: mol_type = other DNA

SEQ ID NO: 131 - protein, 10 aa, synthetic construct
GFTFTSRGVS

SEQ ID NO: 132 - protein, 8 aa, synthetic construct
IIPIFGTI

SEQ ID NO: 133 - protein, 11 aa, synthetic construct
ARGGNWNQFDY

SEQ ID NO: 134 - protein, 120 aa, synthetic construct; identical to SEQ ID NO: 54

SEQ ID NO: 135 - DNA, 360 bp, synthetic construct; identical to SEQ ID NO: 55
  source 1..360: mol_type = other DNA

SEQ ID NO: 136 - protein, 6 aa, synthetic construct
QSVSSG

SEQ ID NO: 137 - skipped

SEQ ID NO: 138 - protein, 9 aa, synthetic construct
QQSYSTPPT

SEQ ID NO: 139 - protein, 107 aa, synthetic construct; identical to SEQ ID NO: 119

SEQ ID NO: 140 - DNA, 321 bp, synthetic construct; identical to SEQ ID NO: 120
  source 1..321: mol_type = other DNA

SEQ ID NO: 141 - protein, 10 aa, synthetic construct
GFTFTSRGVS

SEQ ID NO: 142 - protein, 8 aa, synthetic construct
IIPIFGTI

SEQ ID NO: 143 - protein, 11 aa, synthetic construct
TRRGNWNPFDY

SEQ ID NO: 144 - protein, 120 aa, synthetic construct
EVQLVQSGSELKKPGSSVKVSCKASGFTFTSRGVSISWVRQAPGQGLEWLGSIIPIFGTITYAQKFQGRVTITADKSTSTAFMELTSLRSEDTAIYYCTRRGNWNPFDYWGQGTLVTVSS

SEQ ID NO: 145 - DNA, 360 bp, synthetic construct
  source 1..360: mol_type = other DNA
gaagttcaattagttcaatctggttctgaattaaaaaaacctggttcttctgttaaagtttcttgtaaagcttctggttttacttttacttctcgtggtgtttctatttcttgggttcgtcaagctcctggtcaaggtttagaatggttaggttctattattcctatttttggtactattacttatgctcaaaaatttcaaggtcgtgttactattactgctgataaatctacttctactgcttttatggaattaacttctttacgttctgaagatactgctatttattattgtactcgtcgtggtaattggaatccttttgattattggggtcaaggtactttagttactgtttcttct

SEQ ID NO: 146 - protein, 6 aa, synthetic construct
QSIGSY

SEQ ID NO: 147 - skipped

SEQ ID NO: 148 - protein, 9 aa, synthetic construct
QQSYSTPPT

SEQ ID NO: 149 - protein, 107 aa, synthetic construct; identical to SEQ ID NO: 29

SEQ ID NO: 150 - DNA, 321 bp, synthetic construct; identical to SEQ ID NO: 30
  source 1..321: mol_type = other DNA

SEQ ID NO: 151 - protein, 10 aa, synthetic construct
GVSLSSRDYS

SEQ ID NO: 152 - protein, 8 aa, synthetic construct
IIPVFGSL

SEQ ID NO: 153 - protein, 11 aa, synthetic construct
ARGGHWNPFDP

SEQ ID NO: 154 - protein, 120 aa, synthetic construct; identical to SEQ ID NO: 24

SEQ ID NO: 155 - DNA, 360 bp, synthetic construct; identical to SEQ ID NO: 25
  source 1..360: mol_type = other DNA

SEQ ID NO: 156 - protein, 6 aa, synthetic construct
QSVSSG

SEQ ID NO: 157 - skipped

SEQ ID NO: 158 - protein, 9 aa, synthetic construct
QQSYSTPPT

SEQ ID NO: 159 - protein, 107 aa, synthetic construct; identical to SEQ ID NO: 119

SEQ ID NO: 160 - DNA, 321 bp, synthetic construct; identical to SEQ ID NO: 120
  source 1..321: mol_type = other DNA

SEQ ID NO: 161 - protein, 10 aa, synthetic construct
GFTFTSRGVS

SEQ ID NO: 162 - protein, 8 aa, synthetic construct
IIPIFGTI

SEQ ID NO: 163 - protein, 11 aa, synthetic construct
TRRGNWNPFEN

SEQ ID NO: 164 - protein, 120 aa, synthetic construct; identical to SEQ ID NO: 64

SEQ ID NO: 165 - DNA, 360 bp, synthetic construct; identical to SEQ ID NO: 65
  source 1..360: mol_type = other DNA

SEQ ID NO: 166 - protein, 6 aa, synthetic construct
QSVSSG

SEQ ID NO: 167 - skipped

SEQ ID NO: 168 - protein, 9 aa, synthetic construct
QQSYSTLPT

SEQ ID NO: 169 - protein, 107 aa, synthetic construct; identical to SEQ ID NO: 99

SEQ ID NO: 170 - DNA, 321 bp, synthetic construct; identical to SEQ ID NO: 100
  source 1..321: mol_type = other DNA

SEQ ID NO: 171 - protein, 10 aa, synthetic construct
GVTFNSRTFT

SEQ ID NO: 172 - protein, 8 aa, synthetic construct
LLPIFGTA

SEQ ID NO: 173 - protein, 11 aa, synthetic construct
TRRGNWNPFDP

SEQ ID NO: 174 - protein, 120 aa, synthetic construct
EVQLVQSGSELKKPGSSVKVSCKASGVTFNSRTFTISWVRQAPGQGLEWLGSLLPIFGTATYAQKFQGRVTITADKSTSTAFMELTSLRSEDTAIYYCTRRGNWNPFDPWGQGTLVTVSS

SEQ ID NO: 175 - DNA, 360 bp, synthetic construct
  source 1..360: mol_type = other DNA
gaagttcaattagttcaatctggttctgaattaaaaaaacctggttcttctgttaaagtttcttgtaaagcttctggtgttacttttaattctcgtacttttactatttcttgggttcgtcaagctcctggtcaaggtttagaatggttaggttctttattacctatttttggtactgctacttatgctcaaaaatttcaaggtcgtgttactattactgctgataaatctacttctactgcttttatggaattaacttctttacgttctgaagatactgctatttattattgtactcgtcgtggtaattggaatccttttgatccttggggtcaaggtactttagttactgtttcttct

SEQ ID NO: 176 - protein, 6 aa, synthetic construct
QSISSY

SEQ ID NO: 177 - skipped

SEQ ID NO: 178 - protein, 9 aa, synthetic construct
QQSYSTPPT

SEQ ID NO: 179 - protein, 107 aa, synthetic construct; identical to SEQ ID NO: 9

SEQ ID NO: 180 - DNA, 321 bp, synthetic construct; identical to SEQ ID NO: 10
  source 1..321: mol_type = other DNA

SEQ ID NO: 181 - protein, 10 aa, synthetic construct
GVTFNSRTFT

SEQ ID NO: 182 - protein, 8 aa, synthetic construct
IIPIFGTI

SEQ ID NO: 183 - protein, 11 aa, synthetic construct
TRRGNWNPFDY

SEQ ID NO: 184 - protein, 120 aa, synthetic construct
EVQLVQSGSELKKPGSSVKVSCKASGVTFNSRTFTISWVRQAPGQGLEWLGSIIPIFGTITYAQKFQGRVTITADKSTSTAFMELTSLRSEDTAIYYCTRRGNWNPFDYWGQGTLVTVSS

SEQ ID NO: 185 - DNA, 360 bp, synthetic construct
  source 1..360: mol_type = other DNA
gaagttcaattagttcaatctggttctgaattaaaaaaacctggttcttctgttaaagtttcttgtaaagcttctggtgttacttttaattctcgtacttttactatttcttgggttcgtcaagctcctggtcaaggtttagaatggttaggttctattattcctatttttggtactattacttatgctcaaaaatttcaaggtcgtgttactattactgctgataaatctacttctactgcttttatggaattaacttctttacgttctgaagatactgctatttattattgtactcgtcgtggtaattggaatccttttgattattggggtcaaggtactttagttactgtttcttct

SEQ ID NO: 186 - protein, 6 aa, synthetic construct
QSISSY

SEQ ID NO: 187 - skipped

SEQ ID NO: 188 - protein, 9 aa, synthetic construct
QQSYSTPPT

SEQ ID NO: 189 - protein, 107 aa, synthetic construct; identical to SEQ ID NO: 9

SEQ ID NO: 190 - DNA, 321 bp, synthetic construct; identical to SEQ ID NO: 10
  source 1..321: mol_type = other DNA

SEQ ID NO: 191 - protein, 10 aa, synthetic construct
GVTFNSRTFT

SEQ ID NO: 192 - protein, 8 aa, synthetic construct
IYPLFGTL

SEQ ID NO: 193 - protein, 11 aa, synthetic construct
TRRGNWNPFDP

SEQ ID NO: 194 - protein, 120 aa, synthetic construct
EVQLVQSGSELKKPGSSVKVSCKASGVTFNSRTFTISWVRQAPGQGLEWLGSIYPLFGTLTYAQKFQGRVTITADKSTSTAFMELTSLRSEDTAIYYCTRRGNWNPFDPWGQGTLVTVSS

SEQ ID NO: 195 - DNA, 360 bp, synthetic construct
  source 1..360: mol_type = other DNA
gaagttcaattagttcaatctggttctgaattaaaaaaacctggttcttctgttaaagtttcttgtaaagcttctggtgttacttttaattctcgtacttttactatttcttgggttcgtcaagctcctggtcaaggtttagaatggttaggttctatttatcctttatttggtactttaacttatgctcaaaaatttcaaggtcgtgttactattactgctgataaatctacttctactgcttttatggaattaacttctttacgttctgaagatactgctatttattattgtactcgtcgtggtaattggaatccttttgatccttggggtcaaggtactttagttactgtttcttct

SEQ ID NO: 196 - protein, 6 aa, synthetic construct
QSISSY

SEQ ID NO: 197 - skipped

SEQ ID NO: 198 - protein, 9 aa, synthetic construct
QQSYSTPPT

SEQ ID NO: 199 - protein, 107 aa, synthetic construct; identical to SEQ ID NO: 9

SEQ ID NO: 200 - DNA, 321 bp, synthetic construct; identical to SEQ ID NO: 10
  source 1..321: mol_type = other DNA

SEQ ID NO: 201 - protein, 10 aa, synthetic construct
GVSLSSRDYS

SEQ ID NO: 202 - protein, 8 aa, synthetic construct
IIPVFGSL

SEQ ID NO: 203 - protein, 11 aa, synthetic construct
ARGGHWNPFDP

SEQ ID NO: 204 - protein, 120 aa, synthetic construct; identical to SEQ ID NO: 24

SEQ ID NO: 205 - DNA, 360 bp, synthetic construct; identical to SEQ ID NO: 25
  source 1..360: mol_type = other DNA

SEQ ID NO: 206 - protein, 6 aa, synthetic construct
QTVSAY

SEQ ID NO: 207 - skipped

SEQ ID NO: 208 - protein, 9 aa, synthetic construct
QQSYSGPPT

SEQ ID NO: 209 - protein, 107 aa, synthetic construct; identical to SEQ ID NO: 109

SEQ ID NO: 210 - DNA, 321 bp, synthetic construct; identical to SEQ ID NO: 110
  source 1..321: mol_type = other DNA

SEQ ID NO: 211 - protein, 10 aa, synthetic construct
GVTFNSRTFT

SEQ ID NO: 212 - protein, 8 aa, synthetic construct
IIPVFGSL

SEQ ID NO: 213 - protein, 11 aa, synthetic construct
TRRGNWNPFDP

SEQ ID NO: 214 - protein, 120 aa, synthetic construct
EVQLVQSGSELKKPGSSVKVSCKASGVTFNSRTFTISWVRQAPGQGLEWLGSIIPVFGSLTYAQKFQGRVTITADKSTSTAFMELTSLRSEDTAIYYCTRRGNWNPFDPWGQGTLVTVSS

SEQ ID NO: 215 - DNA, 360 bp, synthetic construct
  source 1..360: mol_type = other DNA
gaagttcaattagttcaatctggttctgaattaaaaaaacctggttcttctgttaaagtttcttgtaaagcttctggtgttacttttaattctcgtacttttactatttcttgggttcgtcaagctcctggtcaaggtttagaatggttaggttctattattcctgtttttggttctttaacttatgctcaaaaatttcaaggtcgtgttactattactgctgataaatctacttctactgcttttatggaattaacttctttacgttctgaagatactgctatttattattgtactcgtcgtggtaattggaatccttttgatccttggggtcaaggtactttagttactgtttcttct

SEQ ID NO: 216 - protein, 6 aa, synthetic construct
QSISSY

SEQ ID NO: 217 - skipped

SEQ ID NO: 218 - protein, 9 aa, synthetic construct
QQSYSTPPT

SEQ ID NO: 219 - protein, 107 aa, synthetic construct; identical to SEQ ID NO: 9

SEQ ID NO: 220 - DNA, 321 bp, synthetic construct; identical to SEQ ID NO: 10
  source 1..321: mol_type = other DNA

SEQ ID NO: 221 - protein, 10 aa, synthetic construct
GVTFNSRTFT

SEQ ID NO: 222 - protein, 8 aa, synthetic construct
IIPIFGTI

SEQ ID NO: 223 - protein, 11 aa, synthetic construct
TRRGNWNPFDP

SEQ ID NO: 224 - protein, 120 aa, synthetic construct; identical to SEQ ID NO: 84

SEQ ID NO: 225 - DNA, 360 bp, synthetic construct; identical to SEQ ID NO: 85
  source 1..360: mol_type = other DNA

SEQ ID NO: 226 - protein, 6 aa, synthetic construct
QSISSY

SEQ ID NO: 227 - skipped

SEQ ID NO: 228 - protein, 9 aa, synthetic construct
QQSYSEPTT

SEQ ID NO: 229 - protein, 107 aa, synthetic construct
DIQMTQSPSSLSASVGDRVTITCRASQSISSYLNWYQQKPGKAPKLLIYAASSLQSGVPSRFSGSGSGTDFTLTISSLQPEDFATYYCQQSYSEPTTFGQGTKVEIK

SEQ ID NO: 230 - DNA, 321 bp, synthetic construct
  source 1..321: mol_type = other DNA
gatattcaaatgactcaatctccttcttctttatctgcttctgttggtgatcgtgttactattacttgtcgtgcttctcaatctatttcttcttatttaaattggtatcaacaaaaacctggtaaagctcctaaattattaatttatgctgcttcttctttacaatctggtgttccttctcgtttttctggttctggttctggtactgattttactttaactatttcttctttacaacctgaagattttgctacttattattgtcaacaatcttattctgaacctactacttttggtcaaggtactaaagttgaaattaaa

SEQ ID NO: 231 - protein, 10 aa, synthetic construct
GVTFNSRTFT

SEQ ID NO: 232 - protein, 8 aa, synthetic construct
IIPIFGTI

SEQ ID NO: 233 - protein, 11 aa, synthetic construct
TRRGNWNPFDP

SEQ ID NO: 234 - protein, 120 aa, synthetic construct; identical to SEQ ID NO: 84

SEQ ID NO: 235 - DNA, 360 bp, synthetic construct; identical to SEQ ID NO: 85
  source 1..360: mol_type = other DNA

SEQ ID NO: 236 - protein, 6 aa, synthetic construct
QSIGSY

SEQ ID NO: 237 - skipped

SEQ ID NO: 238 - protein, 9 aa, synthetic construct
QQSYSTPPT

SEQ ID NO: 239 - protein, 107 aa, synthetic construct; identical to SEQ ID NO: 29

SEQ ID NO: 240 - DNA, 321 bp, synthetic construct; identical to SEQ ID NO: 30
  source 1..321: mol_type = other DNA

SEQ ID NO: 241 - protein, 10 aa, synthetic construct
GFTFTSRGVS

SEQ ID NO: 242 - protein, 8 aa, synthetic construct
IIPIFGTI

SEQ ID NO: 243 - protein, 11 aa, synthetic construct
TRRGNWNPFDY

SEQ ID NO: 244 - protein, 120 aa, synthetic construct; identical to SEQ ID NO: 144

SEQ ID NO: 245 - DNA, 360 bp, synthetic construct; identical to SEQ ID NO: 145
  source 1..360: mol_type = other DNA

SEQ ID NO: 246 - protein, 6 aa, synthetic construct
QTVSAY

SEQ ID NO: 247 - skipped

SEQ ID NO: 248 - protein, 9 aa, synthetic construct
QQSYSGPPT

SEQ ID NO: 249 - protein, 107 aa, synthetic construct; identical to SEQ ID NO: 109

SEQ ID NO: 250 - DNA, 321 bp, synthetic construct; identical to SEQ ID NO: 110
  source 1..321: mol_type = other DNA

SEQ ID NO: 251 - protein, 10 aa, synthetic construct
GVSISSVAFT

SEQ ID NO: 252 - protein, 8 aa, synthetic construct
FTPIFGTV

SEQ ID NO: 253 - protein, 11 aa, synthetic construct
ARGGHWNPFDP

SEQ ID NO: 254 - protein, 120 aa, synthetic construct
EVQLVQSGSELKKPGSSVKVSCKASGVSISSVAFTISWVRQAPGQGLEWLGSFTPIFGTVTYAQKFQGRVTITADKSTSTAFMELTSLRSEDTAIYYCARGGHWNPFDPWGQGTLVTVSS

SEQ ID NO: 255 - DNA, 360 bp, synthetic construct
  source 1..360: mol_type = other DNA
gaagttcaattagttcaatctggttctgaattaaaaaaacctggttcttctgttaaagtttcttgtaaagcttctggtgtttctatttcttctgttgcttttactatttcttgggttcgtcaagctcctggtcaaggtttagaatggttaggttcttttactcctatttttggtactgttacttatgctcaaaaatttcaaggtcgtgttactattactgctgataaatctacttctactgcttttatggaattaacttctttacgttctgaagatactgctatttattattgtgctcgtggtggtcattggaatccttttgatccttggggtcaaggtactttagttactgtttcttct

SEQ ID NO: 256 - protein, 6 aa, synthetic construct
QSISSY

SEQ ID NO: 257 - skipped

SEQ ID NO: 258 - protein, 9 aa, synthetic construct
QQSYSTPPT

SEQ ID NO: 259 - protein, 107 aa, synthetic construct; identical to SEQ ID NO: 9

SEQ ID NO: 260 - DNA, 321 bp, synthetic construct; identical to SEQ ID NO: 10
  source 1..321: mol_type = other DNA

SEQ ID NO: 261 - protein, 10 aa, synthetic construct
GFTFTSRGVS

SEQ ID NO: 262 - protein, 8 aa, synthetic construct
IIPIFGTI

SEQ ID NO: 263 - protein, 11 aa, synthetic construct
TRRGNWNPFDY

SEQ ID NO: 264 - protein, 120 aa, synthetic construct; identical to SEQ ID NO: 144

SEQ ID NO: 265 - DNA, 360 bp, synthetic construct; identical to SEQ ID NO: 145
  source 1..360: mol_type = other DNA

SEQ ID NO: 266 - protein, 6 aa, synthetic construct
QSVSSG

SEQ ID NO: 267 - skipped

SEQ ID NO: 268 - protein, 9 aa, synthetic construct
QQSYSTPPT

SEQ ID NO: 269 - protein, 107 aa, synthetic construct; identical to SEQ ID NO: 119

SEQ ID NO: 270 - DNA, 321 bp, synthetic construct; identical to SEQ ID NO: 120
  source 1..321: mol_type = other DNA

SEQ ID NO: 271 - protein, 10 aa, synthetic construct
GVSISSVAFT

SEQ ID NO: 272 - protein, 8 aa, synthetic construct
IIPIFGTI

SEQ ID NO: 273 - protein, 11 aa, synthetic construct
TRRGNWNPFDP

SEQ ID NO: 274 - protein, 120 aa, synthetic construct
EVQLVQSGSELKKPGSSVKVSCKASGVSISSVAFTISWVRQAPGQGLEWLGSIIPIFGTITYAQKFQGRVTITADKSTSTAFMELTSLRSEDTAIYYCTRRGNWNPFDPWGQGTLVTVSS

SEQ ID NO: 275 - DNA, 360 bp, synthetic construct
  source 1..360: mol_type = other DNA
gaagttcaattagttcaatctggttctgaattaaaaaaacctggttcttctgttaaagtttcttgtaaagcttctggtgtttctatttcttctgttgcttttactatttcttgggttcgtcaagctcctggtcaaggtttagaatggttaggttctattattcctatttttggtactattacttatgctcaaaaatttcaaggtcgtgttactattactgctgataaatctacttctactgcttttatggaattaacttctttacgttctgaagatactgctatttattattgtactcgtcgtggtaattggaatccttttgatccttggggtcaaggtactttagttactgtttcttct

SEQ ID NO: 276 - protein, 6 aa, synthetic construct
QSISSY

SEQ ID NO: 277 - skipped

SEQ ID NO: 278 - protein, 9 aa, synthetic construct
QQSYSTPPT

SEQ ID NO: 279 - protein, 107 aa, synthetic construct; identical to SEQ ID NO: 9

SEQ ID NO: 280 - DNA, 321 bp, synthetic construct; identical to SEQ ID NO: 10
  source 1..321: mol_type = other DNA

SEQ ID NO: 281 - protein, 10 aa, synthetic construct
GVTFNSRTFT

SEQ ID NO: 282 - protein, 8 aa, synthetic construct
IIPIFGTI

SEQ ID NO: 283 - protein, 11 aa, synthetic construct
TRRGNWNPFDP

SEQ ID NO: 284 - protein, 120 aa, synthetic construct; identical to SEQ ID NO: 84

SEQ ID NO: 285 - DNA, 360 bp, synthetic construct; identical to SEQ ID NO: 85
  source 1..360: mol_type = other DNA

SEQ ID NO: 286 - protein, 6 aa, synthetic construct
QSISSY

SEQ ID NO: 287 - skipped

SEQ ID NO: 288 - protein, 9 aa, synthetic construct
QQSYGNPPT

SEQ ID NO: 289 - protein, 107 aa, synthetic construct
DIQMTQSPSSLSASVGDRVTITCRASQSISSYLNWYQQKPGKAPKLLIYAASSLQSGVPSRFSGSGSGTDFTLTISSLQPEDFATYYCQQSYGNPPTFGQGTKVEIK

SEQ ID NO: 290 - DNA, 321 bp, synthetic construct
  source 1..321: mol_type = other DNA
gatattcaaatgactcaatctccttcttctttatctgcttctgttggtgatcgtgttactattacttgtcgtgcttctcaatctatttcttcttatttaaattggtatcaacaaaaacctggtaaagctcctaaattattaatttatgctgcttcttctttacaatctggtgttccttctcgtttttctggttctggttctggtactgattttactttaactatttcttctttacaacctgaagattttgctacttattattgtcaacaatcttatggtaatcctcctacttttggtcaaggtactaaagttgaaattaaa

SEQ ID NO: 291 - protein, 10 aa, synthetic construct
GVSLSSRDYS

SEQ ID NO: 292 - protein, 8 aa, synthetic construct
FTPIFGTV

SEQ ID NO: 293 - protein, 11 aa, synthetic construct
ARGGHWNPFDP

SEQ ID NO: 294 - protein, 120 aa, synthetic construct; identical to SEQ ID NO: 4

SEQ ID NO: 295 - DNA, 360 bp, synthetic construct; identical to SEQ ID NO: 5
  source 1..360: mol_type = other DNA

SEQ ID NO: 296 - protein, 6 aa, synthetic construct
QSVSSG

SEQ ID NO: 297 - skipped

SEQ ID NO: 298 - protein, 9 aa, synthetic construct
QQSYSTPPT

SEQ ID NO: 299 - protein, 107 aa, synthetic construct; identical to SEQ ID NO: 119

SEQ ID NO: 300 - DNA, 321 bp, synthetic construct; identical to SEQ ID NO: 120
  source 1..321: mol_type = other DNA

SEQ ID NO: 301 - protein, 10 aa, synthetic construct
GFTFTSRGVS

SEQ ID NO: 302 - protein, 8 aa, synthetic construct
IIPIFGTI

SEQ ID NO: 303 - protein, 11 aa, synthetic construct
ARGGNWNQFDY

SEQ ID NO: 304 - protein, 120 aa, synthetic construct; identical to SEQ ID NO: 54

SEQ ID NO: 305 - DNA, 360 bp, synthetic construct; identical to SEQ ID NO: 55
  source 1..360: mol_type = other DNA

SEQ ID NO: 306 - protein, 6 aa, synthetic construct
QTVSAY

SEQ ID NO: 307 - skipped

SEQ ID NO: 308 - protein, 9 aa, synthetic construct
QQSYSGPPT

SEQ ID NO: 309 - protein, 107 aa, synthetic construct; identical to SEQ ID NO: 109

SEQ ID NO: 310 - DNA, 321 bp, synthetic construct; identical to SEQ ID NO: 110
  source 1..321: mol_type = other DNA

SEQ ID NO: 311 - protein, 10 aa, synthetic construct
GVSLSSRDYS

SEQ ID NO: 312 - protein, 8 aa, synthetic construct
FTPIFGTV

SEQ ID NO: 313 - protein, 11 aa, synthetic construct
ARGGHWNPFDP

SEQ ID NO: 314 - protein, 120 aa, synthetic construct; identical to SEQ ID NO: 4

SEQ ID NO: 315 - DNA, 360 bp, synthetic construct; identical to SEQ ID NO: 5
  source 1..360: mol_type = other DNA

SEQ ID NO: 316 - protein, 6 aa, synthetic construct
QSSSSY

SEQ ID NO: 317 - skipped

SEQ ID NO: 318 - protein, 9 aa, synthetic construct
QQSYGNPPT

SEQ ID NO: 319 - protein, 107 aa, synthetic construct
DIQMTQSPSSLSASVGDRVTITCRASQSSSSYLNWYQQKPGKAPKLLIYVSSSLQSGVPSRFSGSGSGTDFTLTISSLQPEDFATYYCQQSYGNPPTFGQGTKVEIK

SEQ ID NO: 320 - DNA, 321 bp, synthetic construct
  source 1..321: mol_type = other DNA
gatattcaaatgactcaatctccttcttctttatctgcttctgttggtgatcgtgttactattacttgtcgtgcttctcaatcttcttcttcttatttaaattggtatcaacaaaaacctggtaaagctcctaaattattaatttatgtttcttcttctttacaatctggtgttccttctcgtttttctggttctggttctggtactgattttactttaactatttcttctttacaacctgaagattttgctacttattattgtcaacaatcttatggtaatcctcctacttttggtcaaggtactaaagttgaaattaaa

SEQ ID NO: 321 - protein, 10 aa, synthetic construct
GFTFTSRGVS

SEQ ID NO: 322 - protein, 8 aa, synthetic construct
IIPIFGTI

SEQ ID NO: 323 - protein, 11 aa, synthetic construct
TRRGNWNPFDY

SEQ ID NO: 324 - protein, 120 aa, synthetic construct; identical to SEQ ID NO: 144

SEQ ID NO: 325 - DNA, 360 bp, synthetic construct; identical to SEQ ID NO: 145
  source 1..360: mol_type = other DNA

SEQ ID NO: 326 - protein, 6 aa, synthetic construct
QSVSSG

SEQ ID NO: 327 - skipped

SEQ ID NO: 328 - protein, 9 aa, synthetic construct
QQSYSTLPT

SEQ ID NO: 329 - protein, 107 aa, synthetic construct; identical to SEQ ID NO: 99

SEQ ID NO: 330 - DNA, 321 bp, synthetic construct; identical to SEQ ID NO: 100
  source 1..321: mol_type = other DNA

SEQ ID NO: 331 - protein, 10 aa, synthetic construct
GVTFNSRTFT

SEQ ID NO: 332 - protein, 8 aa, synthetic construct
IIPIFGTI

SEQ ID NO: 333 - protein, 11 aa, synthetic construct
TRRGNWNPFDP

SEQ ID NO: 334 - protein, 120 aa, synthetic construct; identical to SEQ ID NO: 84

SEQ ID NO: 335 - DNA, 360 bp, synthetic construct; identical to SEQ ID NO: 85
  source 1..360: mol_type = other DNA

SEQ ID NO: 336 - protein, 6 aa, synthetic construct
QSVSSG

SEQ ID NO: 337 - skipped

SEQ ID NO: 338 - protein, 9 aa, synthetic construct
QQSYSTLPT

SEQ ID NO: 339 - protein, 107 aa, synthetic construct; identical to SEQ ID NO: 99

SEQ ID NO: 340 - DNA, 321 bp, synthetic construct; identical to SEQ ID NO: 100
  source 1..321: mol_type = other DNA

SEQ ID NO: 341 - protein, 10 aa, synthetic construct
GFTFTSRGVS

SEQ ID NO: 342 - protein, 8 aa, synthetic construct
IIPIFGTI

SEQ ID NO: 343 - protein, 11 aa, synthetic construct
TRRGNWNPFDP

SEQ ID NO: 344 - protein, 120 aa, synthetic construct
EVQLVQSGSELKKPGSSVKVSCKASGFTFTSRGVSISWVRQAPGQGLEWLGSIIPIFGTITYAQKFQGRVTITADKSTSTAFMELTSLRSEDTAIYYCTRRGNWNPFDPWGQGTLVTVSS

SEQ ID NO: 345 - DNA, 360 bp, synthetic construct
  source 1..360: mol_type = other DNA
gaagttcaattagttcaatctggttctgaattaaaaaaacctggttcttctgttaaagtttcttgtaaagcttctggttttacttttacttctcgtggtgtttctatttcttgggttcgtcaagctcctggtcaaggtttagaatggttaggttctattattcctatttttggtactattacttatgctcaaaaatttcaaggtcgtgttactattactgctgataaatctacttctactgcttttatggaattaacttctttacgttctgaagatactgctatttattattgtactcgtcgtggtaattggaatccttttgatccttggggtcaaggtactttagttactgtttcttct

SEQ ID NO: 346 - protein, 6 aa, synthetic construct
QSISSY

SEQ ID NO: 347 - skipped

SEQ ID NO: 348 - protein, 9 aa, synthetic construct
QQSYSTPPT

SEQ ID NO: 349 - protein, 107 aa, synthetic construct; identical to SEQ ID NO: 9

SEQ ID NO: 350 - DNA, 321 bp, synthetic construct; identical to SEQ ID NO: 10
  source 1..321: mol_type = other DNA

SEQ ID NO: 351 - protein, 10 aa, synthetic construct
GFTFTSRGVS

SEQ ID NO: 352 - protein, 8 aa, synthetic construct
IIPIFGTI

SEQ ID NO: 353 - protein, 11 aa, synthetic construct
ARGGNWNQFDY

SEQ ID NO: 354 - protein, 120 aa, synthetic construct; identical to SEQ ID NO: 54

SEQ ID NO: 355 - DNA, 360 bp, synthetic construct; identical to SEQ ID NO: 55
  source 1..360: mol_type = other DNA

SEQ ID NO: 356 - protein, 6 aa, synthetic construct
QSIGSY

SEQ ID NO: 357 - skipped

SEQ ID NO: 358 - protein, 9 aa, synthetic construct
QQSYSTPPT

SEQ ID NO: 359 - protein, 107 aa, synthetic construct; identical to SEQ ID NO: 29

SEQ ID NO: 360 - DNA, 321 bp, synthetic construct; identical to SEQ ID NO: 30
  source 1..321: mol_type = other DNA

SEQ ID NO: 361 - protein, 10 aa, synthetic construct
GFTFTSRGVS

SEQ ID NO: 362 - protein, 8 aa, synthetic construct
IIPIFGTI

SEQ ID NO: 363 - protein, 11 aa, synthetic construct
TRRGNWNPFEN

SEQ ID NO: 364 - protein, 120 aa, synthetic construct; identical to SEQ ID NO: 64

SEQ ID NO: 365 - DNA, 360 bp, synthetic construct; identical to SEQ ID NO: 65
  source 1..360: mol_type = other DNA

SEQ ID NO: 366 - protein, 6 aa, synthetic construct
QSIGSY

SEQ ID NO: 367 - skipped

SEQ ID NO: 368 - protein, 9 aa, synthetic construct
QQSYSTPPT

SEQ ID NO: 369 - protein, 107 aa, synthetic construct; identical to SEQ ID NO: 29

SEQ ID NO: 370 - DNA, 321 bp, synthetic construct; identical to SEQ ID NO: 30
  source 1..321: mol_type = other DNA

SEQ ID NO: 371 - protein, 10 aa, synthetic construct
GVTFNSRTFT

SEQ ID NO: 372 - protein, 8 aa, synthetic construct
IIPIFGTI

SEQ ID NO: 373 - protein, 11 aa, synthetic construct
TRRGNWNPFDP

SEQ ID NO: 374 - protein, 120 aa, synthetic construct; identical to SEQ ID NO: 84

SEQ ID NO: 375 - DNA, 360 bp, synthetic construct; identical to SEQ ID NO: 85
  source 1..360: mol_type = other DNA

SEQ ID NO: 376 - protein, 6 aa, synthetic construct
QTVSAY

SEQ ID NO: 377 - skipped

SEQ ID NO: 378 - protein, 9 aa, synthetic construct
QQSYSGPPT

SEQ ID NO: 379 - protein, 107 aa, synthetic construct; identical to SEQ ID NO: 109

SEQ ID NO: 380 - DNA, 321 bp, synthetic construct; identical to SEQ ID NO: 110
  source 1..321: mol_type = other DNA

SEQ ID NO: 381 - protein, 10 aa, synthetic construct
GVTFRTSAIS

SEQ ID NO: 382 - protein, 8 aa, synthetic construct
IIPIFGTI

SEQ ID NO: 383 - protein, 11 aa, synthetic construct
TRRGNWNPFDP

SEQ ID NO: 384 - protein, 120 aa, synthetic construct
EVQLVQSGSELKKPGSSVKVSCKASGVTFRTSAISISWVRQAPGQGLEWLGSIIPIFGTITYAQKFQGRVTITADKSTSTAFMELTSLRSEDTAIYYCTRRGNWNPFDPWGQGTLVTVSS

SEQ ID NO: 385 - DNA, 360 bp, synthetic construct
  source 1..360: mol_type = other DNA
gaagttcaattagttcaatctggttctgaattaaaaaaacctggttcttctgttaaagtttcttgtaaagcttctggtgttacttttcgtacttctgctatttctatttcttgggttcgtcaagctcctggtcaaggtttagaatggttaggttctattattcctatttttggtactattacttatgctcaaaaatttcaaggtcgtgttactattactgctgataaatctacttctactgcttttatggaattaacttctttacgttctgaagatactgctatttattattgtactcgtcgtggtaattggaatccttttgatccttggggtcaaggtactttagttactgtttcttct

SEQ ID NO: 386 - protein, 6 aa, synthetic construct
QSISSY

SEQ ID NO: 387 - skipped

SEQ ID NO: 388 - protein, 9 aa, synthetic construct
QQSYSTPPT

SEQ ID NO: 389 - protein, 107 aa, synthetic construct; identical to SEQ ID NO: 9

SEQ ID NO: 390 - DNA, 321 bp, synthetic construct; identical to SEQ ID NO: 10
  source 1..321: mol_type = other DNA

SEQ ID NO: 391 - protein, 8 aa, synthetic construct
GYSFTSYY

SEQ ID NO: 392 - protein, 8 aa, synthetic construct
ILPGSGST

SEQ ID NO: 393 - protein, 12 aa, synthetic construct
AKGGGSLWYFDV

SEQ ID NO: 394 - protein, 119 aa, synthetic construct
QAYLQQSGTELVKPGASVKLSCKASGYSFTSYYMFWVKKRPGQGLEWIGEILPGSGSTNYNEQFKGKATFTADPSSNTAYMQLSSLTSEDSAVYYCAKGGGSLWYFDVWGAGTTVTVSS

SEQ ID NO: 395 - DNA, 357 bp, synthetic construct
  source 1..357: mol_type = other DNA
caggcatatctgcagcaatctgggacggaactggtaaaacccggagccagcgtgaagctttcgtgcaaggcctccggctactccttcacatcctactatatgttttgggtcaagaagaggcctggtcagggactcgagtggatcggggagattttaccaggcagcggctccactaattacaacgaacaattcaaagggaaggcgacctttaccgccgatccctcaagtaacaccgcatacatgcagctgtccagcttgacatctgaggacagcgccgtgtattactgtgctaaaggaggcgggagcctctggtatttcgacgtgtggggagctggcaccacagttactgtcagttca

SEQ ID NO: 396 - protein, 11 aa, synthetic construct
QSLVHSNGNTY

SEQ ID NO: 397 - skipped

SEQ ID NO: 398 - protein, 10 aa, synthetic construct
SQSTHVPPYT

SEQ ID NO: 399 - protein, 113 aa, synthetic construct
DVVMTQTPLSLPVSLGDQASISCRSSQSLVHSNGNTYLHWYLQKPGQSPKLLIYKVSNRFSGVPDRFSGSGSGTDFTLKISRVEAEDLGVYFCSQSTHVPPYTFGGGTKLEIK

SEQ ID NO: 400 - DNA, 339 bp, synthetic construct
  source 1..339: mol_type = other DNA
gacgttgtgatgacgcagactccactgtctctaccagtatccctcggcgatcaagcttccataagttgccggtccagccagagcctggtgcacagtaacggcaatacctatcttcactggtacctccagaagcctggacagagccctaaattgcttatctacaaggtgagtaaccgtttctctggtgtccccgaccgattcagcggttccggatcagggacagattttacactgaagatctctcgcgtggaggccgaggacctgggagtctacttttgttcacaaagcacccatgtccccccgtataccttcggcggggggactaaattagaaataaag

SEQ ID NO: 401 - protein, 8 aa, synthetic construct
GFPFGNYL

SEQ ID NO: 402 - protein, 8 aa, synthetic construct
ISGGGVST

SEQ ID NO: 403 - protein, 12 aa, synthetic construct
ARGPSSWPAFDV

SEQ ID NO: 404 - protein, 118 aa, synthetic construct
EVQLLESGGGLVQPGGSLRLSCAASGFPFGNYLMNWVRQAPGKGLEWVSVISGGGVSTYYADSVKGRFTISRDNSKNTLYLQMNSLRAEDTAVYCARGPSSWPAFDVWGQGTLVTVSS

SEQ ID NO: 405 - DNA, 354 bp, synthetic construct
  source 1..354: mol_type = other DNA
gaggtgcaactgttagagtctggggggggacttgtgcagccaggcggttccctgaggttaagttgcgcagccagtggcttcccgttcggcaattatctgatgaactgggtgcggcaggcacctgggaagggattggaatgggtcagcgtcatttcagggggaggcgtctcgacgtactacgccgactccgtaaaaggccgatttaccatctcccgcgataacagcaagaacaccctatacctgcagatgaatagcctcagggccgaagacacagccgtgtattgtgctcgtggaccctcttcctggcccgcttttgatgtgtggggccagggtacactcgttactgtttcaagc

SEQ ID NO: 406 - protein, 11 aa, synthetic construct
QSLVHSNGNTY

SEQ ID NO: 407 - skipped

SEQ ID NO: 408 - protein, 10 aa, synthetic construct
SQSTHVPPYT

SEQ ID NO: 409 - protein, 113 aa, synthetic construct; identical to SEQ ID NO: 399

SEQ ID NO: 410 - DNA, 339 bp, synthetic construct
  source 1..339: mol_type = other DNA
gacgttgtgatgacgcagactccactgtctctaccagtatccctcggcgatcaagcttccataagttgccggtccagccagagcctggtgcacagtaacggcaatacctatcttcactggtacctccagaagcctggacagagccctaaattgcttatctacaaggtgagtaaccgtttctctggtgtccccgaccgattcagcggttccggatcagggacagattttacactgaagatctctcgcgtggaggccgaggacctgggagtctacttttgttcacaaagcacccatgtccccccgtataccttcggcggggggactaaattagaaattaaa

SEQ ID NO: 411 - protein, 8 aa, synthetic construct
GFNIKDTY

SEQ ID NO: 412 - protein, 8 aa, synthetic construct
IDPENGNT

SEQ ID NO: 413 - protein, 6 aa, synthetic construct
IRSGHY

SEQ ID NO: 414 - protein, 113 aa, synthetic construct
EVRLQQSGAELVKPGASVKLSCTASGFNIKDTYMHWVKQRPEQGLEWIGWIDPENGNTKYDPKFQGKATITTDTSSNTAYLQLSSLTSEDSAVYYCIRSGHYWGQGTTVTVSS

SEQ ID NO: 415 - DNA, 339 bp, synthetic construct
  source 1..339: mol_type = other DNA
gaagtgcgcttacagcaatccggcgcagaattggtgaaacccggagctagtgtaaagctgtcttgtaccgccagcggctttaacatcaaagacacgtacatgcactgggttaaacagcggccagagcaggggctcgagtggattggatggatagacccggagaacggaaacactaagtatgaccctaagttccagggtaaggctacgatcacgacagataccagcagcaataccgcctacctgcaactttcttccctgacctcagaagattcggccgtctactattgcattaggtccgggcattattgggggcagggcactaccgtcactgtgagtagc

SEQ ID NO: 416 - protein, 10 aa, synthetic construct
QSVDSDGDSY

SEQ ID NO: 417 - skipped

SEQ ID NO: 418 - protein, 9 aa, synthetic construct
QQSHEYPFT

SEQ ID NO: 419 - protein, 111 aa, synthetic construct
DIQLTQSPSSLSASVGDRVTITCKASQSVDSDGDSYMNWYQQKPGKAPKLLIYGASNLESGVPSRFSGSGSGTDFTLTISSLQPEDFATYYCQQSHEYPFTFGQGTKLEIK

SEQ ID NO: 420 - DNA, 333 bp, synthetic construct
  source 1..333: mol_type = other DNA
gacattcagctgacccagtctcccagctccctgtctgcaagtgtgggcgatcgggttaccatcacatgcaaggcaagccaatccgtggactccgacggagatagctacatgaactggtatcagcagaaacctggtaaggcgcccaagttactgatctatggggccagcaatttggaatctggagtcccaagccgcttcagtggctcagggtcaggcactgattttacgctcactatttcctcccttcaaccggaggacttcgccacatattactgtcagcagagtcacgagtacccttttaccttcggtcagggaaccaaactcgagataaaa

SEQ ID NO: 421 - protein, 8 aa, synthetic construct
GFNIKDTY

SEQ ID NO: 422 - protein, 8 aa, synthetic construct
IDPENGNT

SEQ ID NO: 423 - protein, 6 aa, synthetic construct
IRSGHY

SEQ ID NO: 424 - protein, 113 aa, synthetic construct; identical to SEQ ID NO: 414

SEQ ID NO: 425 - DNA, 339 bp, synthetic construct; identical to SEQ ID NO: 415
  source 1..339: mol_type = other DNA

SEQ ID NO: 426 - protein, 6 aa, synthetic construct
ETISNF

SEQ ID NO: 427 - skipped

SEQ ID NO: 428 - protein, 9 aa, synthetic construct
QQFYSVPWT

SEQ ID NO: 429 - protein, 107 aa, synthetic construct
DIQMTQSPSSLSASVGDRVTITCRASETISNFLNWYQQKPGKAPKLLIYTTSSLQRGVPSRFSGSGSGTDFTLTISSLQPEDFATYYCQQFYSVPWTFGGGTKVEIK

SEQ ID NO: 430 - DNA, 321 bp, synthetic construct
  source 1..321: mol_type = other DNA
gatattcaaatgactcagtctccatcctccttatcagccagtgtgggcgaccgcgtaaccataacatgtcgagcttccgagacgatcagcaactttctcaactggtatcagcagaagcctggaaaggccccaaaattgctgatctataccacctcaagccttcagcgtggtgtccccagtcggttctctggcagcggcagtggtacagactttactctgaccatcagctccctgcaacccgaggatttcgcaacttactactgccagcagttttactccgtgccttggacattcgggggagggacgaaggttgaaataaag

SEQ ID NO: 431 - protein, 8 aa, synthetic construct
GFPFGNYL

SEQ ID NO: 432 - protein, 8 aa, synthetic construct
ISGGGVST

SEQ ID NO: 433 - protein, 12 aa, synthetic construct
ARGPSSWPAFDV

SEQ ID NO: 434 - protein, 119 aa, synthetic construct
EVQLLESGGGLVQPGGSLRLSCAASGFPFGNYLMNWVRQAPGKGLEWVSVISGGGVSTYYADSVKGRFTISRDNSKNTLYLQMNSLRAEDTAVYYCARGPSSWPAFDVWGQGTLVTVSS

SEQ ID NO: 435 - DNA, 357 bp, synthetic construct
  source 1..357: mol_type = other DNA
gaagtgcagcttctggagtctggaggcggattggtgcagcccggaggatcactgaggttaagctgtgccgcctctgggttccccttcggcaattatctaatgaactgggttcgacaggccccagggaaaggcctcgaatgggtatccgtcattagtggcggcggggtgagtacatattacgcagacagcgtcaagggccgctttaccatctcccgggataacagcaagaacacactgtacctccagatgaatagtctgcgtgccgaggacactgctgtctactattgcgctaggggtccttcaagctggccggcatttgatgtttgggggcaaggtacccttgtgacggtgtcgtcc

SEQ ID NO: 436 - protein, 6 aa, synthetic construct
GDIRNY

SEQ ID NO: 437 - skipped

SEQ ID NO: 438 - protein, 9 aa, synthetic construct
QHHYGTPPT

SEQ ID NO: 439 - protein, 107 aa, synthetic construct
DIQMTQSPASLSASVGETVTITCRASGDIRNYLIWYQQKQGKSPQVLVYNAKTLADGVPSRFSGSGSGTQFSLKINSLQPEDFGSYYCQHHYGTPPTFGGGTKLEIK

SEQ ID NO: 440 - DNA, 321 bp, synthetic construct
  source 1..321: mol_type = other DNA
gatattcagatgactcaaagccctgcgtccctgtctgcctctgtcggcgaaacggttaccataacatgccgcgcttcaggcgatatccggaactatctgatctggtaccagcagaagcaagggaagtcccctcaggtgcttgtgtataacgccaaaaccctcgcagacggggtaccaagtcgattttccggatcaggaagcggcacccagttctccttaaagatcaatagtttgcagcccgaggacttcggcagctattactgtcagcaccactacggtacaccacccacttttggtgggggaacaaaactggagataaag

SEQ ID NO: 441 - protein, 8 aa, synthetic construct
GFNIKDYY

SEQ ID NO: 442 - protein, 8 aa, synthetic construct
IDPENGDT

SEQ ID NO: 443 - protein, 6 aa, synthetic construct
NTGFDY

SEQ ID NO: 444 - protein, 113 aa, synthetic construct
QAYLQQSGAELVRSGASVKLSCTASGFNIKDYYMHWVKQRPEQGLEWIGWIDPENGDTEYAPKFQGKATMTADTSSNTAYLQLSSLTSEDTAVYYCNTGFDYWGQGTTLTVSS

SEQ ID NO: 445 - DNA, 339 bp, synthetic construct
  source 1..339: mol_type = other DNA
caggcttatctccagcaatcaggcgctgagcttgtgcggagcggagcaagtgttaagctgagctgcaccgcctccggatttaacataaaggactattacatgcactgggtcaagcagaggcctgagcaggggttagaatggatcgggtggattgatcccgaaaatggagacacggaatatgctccgaaattccagggcaaagccacaatgactgcagacacatccagcaatactgcctacttgcaactctccagtctgacctcagaggatacagccgtgtactattgtaacaccgggttcgattactggggtcagggcactaccctgacagtgtcttcg

SEQ ID NO: 446 - protein, 10 aa, synthetic construct
QSVDSDGDSY

SEQ ID NO: 447 - skipped

SEQ ID NO: 448 - protein, 9 aa, synthetic construct
QQSHEYPFT

SEQ ID NO: 449 - protein, 111 aa, synthetic construct; identical to SEQ ID NO: 419

SEQ ID NO: 450 - DNA, 333 bp, synthetic construct; identical to SEQ ID NO: 420
  source 1..333: mol_type = other DNA

SEQ ID NO: 451 - protein, 8 aa, synthetic construct
GYTFTNYG

SEQ ID NO: 452 - protein, 8 aa, synthetic construct
IDTYTGEP

SEQ ID NO: 453 - protein, 9 aa, synthetic construct
SRQLGLLDY

SEQ ID NO: 454 - protein, 116 aa, synthetic construct
QVQLQQSGPELKKPGETVKISCKASGYTFTNYGMNWVKQAPGKGLKWMGWIDTYTGEPTYADDFKGRFAFSLETSASTAYLQINNLKNEDTATYFCSRQLGLLDYWGQGTTLTVSS

SEQ ID NO: 455 - DNA, 348 bp, synthetic construct
  source 1..348: mol_type = other DNA
caggtccagcttcagcaatccggccctgaactcaaaaagcccggagagacagttaagatcagctgcaaagcctccgggtatacattcaccaactatgggatgaactgggtgaagcaagctccgggtaaaggcctgaagtggatggggtggattgacacttataccggagagccaacttacgccgatgatttcaaaggcaggtttgctttctctctagagacaagcgccagtacggcctacctgcagataaataacctcaagaatgaagacaccgcgacctacttttgctcacggcagttgggcttactggactactggggccagggaaccacactgactgtgagtagc

SEQ ID NO: 456 - protein, 10 aa, synthetic construct
QSVDSDGDSY

SEQ ID NO: 457 - skipped

SEQ ID NO: 458 - protein, 9 aa, synthetic construct
QQYHSHPYT

SEQ ID NO: 459 - protein, 111 aa, synthetic construct
DIQLTQSPSSLSASVGDRVTITCKASQSVDSDGDSYMNWYQQKPGKAPKLLIYGASNLESGVPSRFSGSGSGTDFTLTISSLQPEDFATYYCQQYHSHPYTFGQGTKLEIK

SEQ ID NO: 460 - DNA, 333 bp, synthetic construct
  source 1..333: mol_type = other DNA
gatatccaactgactcagagtcctagcagccttagcgcatcagtgggtgatcgcgttaccatcacatgcaaagcgagtcagagcgtggattcagacggggactcttacatgaactggtatcagcagaagcccgggaaagccccaaagttgctcatatacggcgctagtaatttagagtcaggggtcccctctcggttctccggatccggctctggcaccgacttcacacttaccatttccagcctgcagcctgaagactttgccacttattattgtcagcagtaccactcccacccgtacacatttggacaaggtacgaagctggagataaag

SEQ ID NO: 461 - protein, 8 aa, synthetic construct
GFNIKDTY

SEQ ID NO: 462 - protein, 8 aa, synthetic construct
IDPENGNT

SEQ ID NO: 463 - protein, 6 aa, synthetic construct
IRSGHY

SEQ ID NO: 464 - protein, 113 aa, synthetic construct; identical to SEQ ID NO: 414

SEQ ID NO: 465 - DNA, 339 bp, synthetic construct; identical to SEQ ID NO: 415
  source 1..339: mol_type = other DNA

SEQ ID NO: 466 - protein, 10 aa, synthetic construct
QSVDSDGDSY

SEQ ID NO: 467 - skipped

SEQ ID NO: 468 - protein, 9 aa, synthetic construct
QQYHSHPYT

SEQ ID NO: 469 - protein, 111 aa, synthetic construct; identical to SEQ ID NO: 459

SEQ ID NO: 470 - DNA, 333 bp, synthetic construct; identical to SEQ ID NO: 460
  source 1..333: mol_type = other DNA

SEQ ID NO: 471 - protein, 8 aa, synthetic construct
GFTFTDYY

SEQ ID NO: 472 - protein, 10 aa, synthetic construct
IRNKANGYTT

SEQ ID NO: 473 - protein, 11 aa, synthetic construct
ARDDYDDYFAY

SEQ ID NO: 474 - protein, 120 aa, synthetic construct
EVLLVESGGGLVQPGGSLRLSCATSGFTFTDYYMSWVRQPPGKALEWLGFIRNKANGYTTEYSASVKGRFTISRDNSQSILYLQMNTLRGEDSATYYCARDDYDDYFAYWGQGTTLTVSS

SEQ ID NO: 475 - DNA, 360 bp, synthetic construct
  source 1..360: mol_type = other DNA
gaagtgcttctggtggaatccggcgggggtttagttcagcctggagggtccctcaggctgagctgtgctacatcaggattcacctttaccgactactacatgagttgggtacgtcagcccccaggcaaggcactggagtggttggggttcattcgaaacaaagccaatggctataccaccgagtacagtgcttccgtcaaggggcggttcacaatcagccgcgataatagccagtcgatcctttatctgcaaatgaacactctccggggcgaggacagcgcaacatactattgcgccagggacgactatgatgattactttgcctactggggacagggcactacgctaactgtgtcttct

SEQ ID NO: 476 - protein, 6 aa, synthetic construct
ETISNF

SEQ ID NO: 477 - skipped

SEQ ID NO: 478 - protein, 9 aa, synthetic construct
QQFYSVPWT

SEQ ID NO: 479 - protein, 107 aa, synthetic construct; identical to SEQ ID NO: 429

SEQ ID NO: 480 - DNA, 321 bp, synthetic construct; identical to SEQ ID NO: 430
  source 1..321: mol_type = other DNA

SEQ ID NO: 481 - protein, 8 aa, synthetic construct
GFNIKDTY

SEQ ID NO: 482 - protein, 8 aa, synthetic construct
IDPENGNT

SEQ ID NO: 483 - protein, 6 aa, synthetic construct
IRSGHY

SEQ ID NO: 484 - protein, 113 aa, synthetic construct; identical to SEQ ID NO: 414

SEQ ID NO: 485 - DNA, 339 bp, synthetic construct; identical to SEQ ID NO: 415
  source 1..339: mol_type = other DNA

SEQ ID NO: 486 - protein, 6 aa, synthetic construct
ETISNF

SEQ ID NO: 487 - skipped

SEQ ID NO: 488 - protein, 9 aa, synthetic construct
QQSYSVPWT

SEQ ID NO: 489 - protein, 106 aa, synthetic construct
DIQMTQSPSSLSASVGDRVTITCRASETISNFLNWYQQKPGKAPKLLIYTTSSLQRGVPSRFSGSGSGTDFTLTISSLQPEDFATYYCQQSYSVPWTFGGTKVEIK

SEQ ID NO: 490 - DNA, 318 bp, synthetic construct
  source 1..318: mol_type = other DNA
gatattcagatgacacagtccccaagctctttaagcgcctctgtaggtgaccgggtgaccatcacttgccgtgcaagtgagactatatcaaacttcctgaactggtaccaacagaagcccggcaaggcccctaagttgctgatctataccacatcaagtcttcagcgcggagtgccctctcgattcagtgggagcggaagcggcaccgattttactctgaccatttccagcctccagcctgaggactttgctacgtactattgtcaacagtcctactccgtcccatggacattcggcgggacaaaagttgaaatcaaa

SEQ ID NO: 491 - protein, 8 aa, synthetic construct
GFNIKDYY

SEQ ID NO: 492 - protein, 8 aa, synthetic construct
IDPENGDT

SEQ ID NO: 493 - protein, 6 aa, synthetic construct
NTGFDY

SEQ ID NO: 494 - protein, 113 aa, synthetic construct; identical to SEQ ID NO: 444

SEQ ID NO: 495 - DNA, 339 bp, synthetic construct; identical to SEQ ID NO: 445
  source 1..339: mol_type = other DNA

SEQ ID NO: 496 - protein, 10 aa, synthetic construct
TSNIGSGNNY

SEQ ID NO: 497 - skipped

SEQ ID NO: 498 - protein, 9 aa, synthetic construct
QQYHTYPFT

SEQ ID NO: 499 - protein, 111 aa, synthetic construct
DIQLTQSPSSLSASVGDRVTITCKASTSNIGSGNNYMNWYQQKPGKAPKLLIYGASNLESGVPSRFSGSGSGTDFTLTISSLQPEDFATYYCQQYHTYPFTFGQGTKLEIK

SEQ ID NO: 500 - DNA, 333 bp, synthetic construct
  source 1..333: mol_type = other DNA
gatattcaactcacccagtccccttctagcctctcagcttccgtgggggatcgggtcaccattacctgtaaagccagcacctccaacataggcagtgggaacaactacatgaactggtaccagcagaaaccaggaaaggcgcctaagcttctgatctatggagccagcaatttagaatctggcgttcccagccgcttttctggtagtggtagtgggacagacttcacattgactatctcctcactgcagcccgaggacttcgcaacatattactgccagcagtaccacacgtatccgtttactttcggacaaggcactaagctggagatcaaa

SEQ ID NO: 501 - protein, 8 aa, synthetic construct
GYTFTSYD

SEQ ID NO: 502 - protein, 8 aa, synthetic construct
IFPGDGTS

SEQ ID NO: 503 - protein, 7 aa, synthetic construct
ARRAGNY

SEQ ID NO: 504 - protein, 114 aa, synthetic construct
EVQLVQSGAEVKKPGASVKLSCKASGYTFTSYDINWVRQAPGQGLEWIGWIFPGDGTSKYAQKFQGRATLTTDKSTSTAYMELSSLRSEDTAVYYCARRAGNYWGQGTTLTVSS

SEQ ID NO: 505 - DNA, 342 bp, synthetic construct
  source 1..342: mol_type = other DNA
gaagtgcagctcgtacagtccggggctgaggttaagaaacccggtgcatcggtgaaattgagctgcaaggcctctggctacaccttcacaagctatgatattaactgggtccgtcaagcaccagggcagggcctggaatggatagggtggatctttcctggcgacggaaccagtaagtacgctcagaaattccagggccgagccacacttactaccgataagagcacaagcacggcctatatggagctgagttctttacgctccgaggacaccgctgtctactattgtgccaggcgggcaggcaattactggggacaaggaactacactgactgtgtcatcc

SEQ ID NO: 506 - protein, 6 aa, synthetic construct
QDVGTA

SEQ ID NO: 507 - skipped

SEQ ID NO: 508 - protein, 9 aa, synthetic construct
QQHYSPPYT

SEQ ID NO: 509 - protein, 107 aa, synthetic construct
DVVMTQSHKFMSTSVGDRVSITCKASQDVGTAVAWYQQKPGQSPKALIYWASTRHTGVPDRFTGSGSGTDFTFTISSVQAEDLAVYYCQQHYSPPYTFGGGTKLEMK

SEQ ID NO: 510 - DNA, 321 bp, synthetic construct
  source 1..321: mol_type = other DNA
gacgttgtgatgacccagtcacacaagttcatgtccacttccgtcggcgaccgggtttccataacatgcaaggcttcccaggatgtgggcacagcagtggcttggtatcaacagaaacccgggcagtctcctaaggccctcatctattgggccagtactcgacataccggagtcccagatcgctttaccggatctggtagcgggaccgatttcactttcacaattagcagcgtacaggcggaagacctggccgtgtattactgtcagcaacactacagtccgccctacacgtttggcggaggtacaaaattggagatgaaa

SEQ ID NO: 511 - protein, 8 aa, synthetic construct
GFNIKDTY

SEQ ID NO: 512 - protein, 8 aa, synthetic construct
IDPENGNT

SEQ ID NO: 513 - protein, 6 aa, synthetic construct
IRSGHY

SEQ ID NO: 514 - protein, 113 aa, synthetic construct; identical to SEQ ID NO: 414

SEQ ID NO: 515 - DNA, 339 bp, synthetic construct; identical to SEQ ID NO: 415
  source 1..339: mol_type = other DNA

SEQ ID NO: 516 - protein, 6 aa, synthetic construct
QDVGTA

SEQ ID NO: 517 - skipped

SEQ ID NO: 518 - protein, 10 aa, synthetic construct
QQYNSYPQYT

SEQ ID NO: 519 - protein, 108 aa, synthetic construct
DIVMSQSHKFMSTSVGDRVSITCKASQDVGTAVAWYQQKPGQSPKLLIYWASTRHTGVPDRFTGSGSGTDFTLTISNVQSEDLAEYFCQQYNSYPQYTFGGGTKLEIK

SEQ ID NO: 520 - DNA, 324 bp, synthetic construct
  source 1..324: mol_type = other DNA
gatattgtgatgtcccaatctcataagttcatgtcaaccagcgtcggggaccgcgtaagcataacatgcaaagcctctcaggacgttggcacagcagtggcgtggtatcaacagaagcctgggcagtcccccaaactgcttatctattgggccagtacgcggcacacaggagtgccagatcgatttactggcagcgggagtggaactgattttactctgaccattagcaatgtccagtccgaggacctcgctgaatacttctgtcagcagtacaactcctacccgcagtataccttcggtggtggcaccaagttggagatcaaa

SEQ ID NO: 521 - protein, 9 aa, synthetic construct
GDSITSDYA

SEQ ID NO: 522 - protein, 7 aa, synthetic construct
ISYSGNT

SEQ ID NO: 523 - protein, 10 aa, synthetic construct
VRGMLTAFAY

SEQ ID NO: 524 - protein, 117 aa, synthetic construct
QMQLQQSGPGLVKPSQSLSLTCTVTGDSITSDYAWNWIRQFPGSTLEWMGYISYSGNTAYNPSLKSRISITRDTSNNQFFLQLNSVTTEDTATYYCVRGMLTAFAYWGQGTLVTVSA

SEQ ID NO: 525 - DNA, 351 bp, synthetic construct
  source 1..351: mol_type = other DNA
cagatgcagctccaacaatcaggacctggtctggtaaaaccctctcagagtctttcgttgacctgtacagtcaccggcgatagcattacatccgactacgcctggaattggattaggcagttcccaggaagcacactggaatggatggggtatatcagttatagcggcaataccgcatacaacccgtctctgaagtcccggatatccatcacccgcgatacctccaacaaccagtttttcctgcagctcaatagcgttacaactgaggacacggccacctactactgcgtgcgagggatgttaactgcctttgcttattggggccaggggactctagtgactgtgtcagct

SEQ ID NO: 526 - protein, 6 aa, synthetic construct
ETISNF

SEQ ID NO: 527 - skipped

SEQ ID NO: 528 - protein, 8 aa, synthetic construct
QQSSVPWT

SEQ ID NO: 529 - protein, 106 aa, synthetic construct
DIQMTQSPSSLSASVGDRVTITCRASETISNFLNWYQQKPGKAPKLLIYTTSSLQRGVPSRFSGSGSGTDFTLTISSLQPEDFATYYCQQSSVPWTFGGGTKVEIK

SEQ ID NO: 530 - DNA, 318 bp, synthetic construct
  source 1..318: mol_type = other DNA
gatattcagatgacacagtcaccatctagtcttagcgcaagcgttggcgatcgtgtcactatcacatgtcgcgcctccgaaaccatctccaatttcctcaactggtaccagcagaaacctggcaaggccccaaagttgctgatctataccactagtagcttacagcgaggagtaccttcccggttttctggtagtgggtccggaaccgacttcaccctgacaataagctccctgcaacccgaggacttcgctacgtattactgccagcaatcttcagtgccctggacctttggtgggggcactaaggtggagattaaa

SEQ ID NO: 531 - protein, 9 aa, synthetic construct
GHSITSDCA

SEQ ID NO: 532 - protein, 7 aa, synthetic construct
ISYSGTT

SEQ ID NO: 533 - protein, 12 aa, synthetic construct
ARGLRRDWYFDV

SEQ ID NO: 534 - protein, 119 aa, synthetic construct
EVKLEESGPGLVKPSQSLSLTCTVTGHSITSDCAWNWIRQFPGNKLEWMGYISYSGTTSYNPSLKSRISITRDTSKNQFFLQLNSVTTEDTATYYCARGLRRDWYFDVWGAGTTVTVSS

SEQ ID NO: 535 - DNA, 357 bp, synthetic construct
  source 1..357: mol_type = other DNA
gaagttaaattagaagaatctggtcctggtttagttaaaccttctcaatctttatctttaacttgtactgttactggtcattctattacttctgattgtgcttggaattggattcgtcaatttcctggtaataaattagaatggatgggttatatttcttattctggtactacttcttataatccttctttaaaatctcgtatttctattactcgtgatacttctaaaaatcaattttttttacaattaaattctgttactactgaagatactgctacttattattgtgctcgtggtttacgtcgtgattggtattttgatgtttggggtgctggtactactgttactgtttcttct

SEQ ID NO: 536 - protein, 6 aa, synthetic construct
QNVGKN

SEQ ID NO: 537 - skipped

SEQ ID NO: 538 - protein, 9 aa, synthetic construct
QQYSSYPYT

SEQ ID NO: 539 - protein, 107 aa, synthetic construct
DILLTQSQKFMSTSVGDRVSVTCKASQNVGKNVAWYQQKPGQSPKALIYSASYRYSGVPDRFTGSGSGTDFTLTISNVQSEDLAEYFCQQYSSYPYTFGGGTKLEIK

SEQ ID NO: 540 - DNA, 321 bp, synthetic construct
  source 1..321: mol_type = other DNA
gatattttattaactcaatctcaaaaatttatgtctacttctgttggtgatcgtgtttctgttacttgtaaagcttctcaaaatgttggtaaaaatgttgcttggtatcaacaaaaacctggtcaatctcctaaagctttaatttattctgcttcttatcgttattctggtgttcctgatcgttttactggttctggttctggtactgattttactttaactatttctaatgttcaatctgaagatttagctgaatatttttgtcaacaatattcttcttatccttatacttttggtggtggtactaaattagaaattaaa

SEQ ID NO: 541 - protein, 8 aa, synthetic construct
GFPFGNYL

SEQ ID NO: 542 - protein, 8 aa, synthetic construct
ISGGGVST

SEQ ID NO: 543 - protein, 12 aa, synthetic construct
ARGPSSWPAFDV

SEQ ID NO: 544 - protein, 119 aa, synthetic construct; identical to SEQ ID NO: 434

SEQ ID NO: 545 - DNA, 357 bp, synthetic construct
  source 1..357: mol_type = other DNA
gaagttcaattattagaatctggtggtggtttagttcaacctggtggttctttacgtttatcttgtgctgcttctggttttccttttggtaattatttaatgaattgggttcgtcaagctcctggtaaaggtttagaatgggtttctgttatttctggtggtggtgtttctacttattatgctgattctgttaaaggtcgttttactatttctcgtgataattctaaaaatactttatatttacaaatgaattctttacgtgctgaagatactgctgtttattattgtgctcgtggtccttcttcttggcctgcttttgatgtttggggtcaaggtactttagttactgtttcttct

SEQ ID NO: 546 - protein, 6 aa, synthetic construct
ETISNF

SEQ ID NO: 547 - skipped

SEQ ID NO: 548 - protein, 9 aa, synthetic construct
QQSYSVPWT

SEQ ID NO: 549 - protein, 107 aa, synthetic construct
DIQMTQSPSSLSASVGDRVTITCRASETISNFLNWYQQKPGKAPKLLIYTTSSLQRGVPSRFSGSGSGTDFTLTISSLQPEDFATYYCQQSYSVPWTFGGGTKVEIK

SEQ ID NO: 550 - DNA, 321 bp, synthetic construct
  source 1..321: mol_type = other DNA
gatattcaaatgactcaatctccttcttctttatctgcttctgttggtgatcgtgttactattacttgtcgtgcttctgaaactatttctaattttttaaattggtatcaacaaaaacctggtaaagctcctaaattattaatttatactacttcttctttacaacgtggtgttccttctcgtttttctggttctggttctggtactgattttactttaactatttcttctttacaacctgaagattttgctacttattattgtcaacaatcttattctgttccttggacttttggtggtggtactaaagttgaaattaaa

SEQ ID NO: 551 - protein, 9 aa, synthetic construct
GDSITSDYA

SEQ ID NO: 552 - protein, 7 aa, synthetic construct
ISYSGNT

SEQ ID NO: 553 - protein, 10 aa, synthetic construct
VRGMLTAFAY

SEQ ID NO: 554 - protein, 117 aa, synthetic construct; identical to SEQ ID NO: 524

SEQ ID NO: 555 - DNA, 351 bp, synthetic construct
  source 1..351: mol_type = other DNA
caaatgcaattacaacaatctggtcctggtttagttaaaccttctcaatctttatctttaacttgtactgttactggtgattctattacttctgattatgcttggaattggattcgtcaatttcctggttctactttagaatggatgggttatatttcttattctggtaatactgcttataatccttctttaaaatctcgtatttctattactcgtgatacttctaataatcaattttttttacaattaaattctgttactactgaagatactgctacttattattgtgttcgtggtatgttaactgcttttgcttattggggtcaaggtactttagttactgtttctgct

SEQ ID NO: 556 - protein, 11 aa, synthetic construct
QSLLDSDGKTY

SEQ ID NO: 557 - skipped

SEQ ID NO: 558 - protein, 9 aa, synthetic construct
WQGTHFPQT

SEQ ID NO: 559 - protein, 112 aa, synthetic construct
DIVMTQTPLTLSVTIGQPASISCKSSQSLLDSDGKTYLNWLLQRPGQSPKRLIYLVSKLDSGVPDRFTGSGSGTDFTLKISRVEAEDLGVYYCWQGTHFPQTFGGGTKLEIK

SEQ ID NO: 560 - DNA, 336 bp, synthetic construct
  source 1..336: mol_type = other DNA
gatattgttatgactcaaactcctttaactttatctgttactattggtcaacctgcttctatttcttgtaaatcttctcaatctttattagattctgatggtaaaacttatttaaattggttattacaacgtcctggtcaatctcctaaacgtttaatttatttagtttctaaattagattctggtgttcctgatcgttttactggttctggttctggtactgattttactttaaaaatttctcgtgttgaagctgaagatttaggtgtttattattgttggcaaggtactcattttcctcaaacttttggtggtggtactaaattagaaattaaa

SEQ ID NO: 561 - protein, 8 aa, synthetic construct
GFTFSSFG

SEQ ID NO: 562 - protein, 8 aa, synthetic construct
ISSGSNTI

SEQ ID NO: 563 - protein, 5 aa, synthetic construct
TRGGV

SEQ ID NO: 564 - protein, 112 aa, synthetic construct
EVQLVESGGGLVQPGGSRKLSCAASGFTFSSFGMHWVRQAPEKGLEWVAYISSGSNTIYYADTLKGRFTISRDNAKNTLYLQMSRLKSEDTAMYYCTRGGVFGQGTLVTVSA

SEQ ID NO: 565 - DNA, 336 bp, synthetic construct
  source 1..336: mol_type = other DNA
gaagttcaattagttgaatctggtggtggtttagttcaacctggtggttctcgtaaattatcttgtgctgcttctggttttactttttcttcttttggtatgcattgggttcgtcaagctcctgaaaaaggtttagaatgggttgcttatatttcttctggttctaatactatttattatgctgatactttaaaaggtcgttttactatttctcgtgataatgctaaaaatactttatatttacaaatgtctcgtttaaaatctgaagatactgctatgtattattgtactcgtggtggtgtttttggtcaaggtactttagttactgtttctgct

SEQ ID NO: 566 - protein, 11 aa, synthetic construct
QSLLDSDGKTY

SEQ ID NO: 567 - skipped

SEQ ID NO: 568 - protein, 9 aa, synthetic construct
WQGTHFPHT

SEQ ID NO: 569 - protein, 112 aa, synthetic construct
DIQMTQTPLTLSVTIGQPASISCKSSQSLLDSDGKTYLNWLLQRPGQSPKRLIYLVSKLDSGVPDRFTGSGSGTDFTLKISRVEAEDLGVYYCWQGTHFPHTFGGGTKLEIK

SEQ ID NO: 570 - DNA, 336 bp, synthetic construct
  source 1..336: mol_type = other DNA
gatattcaaatgactcaaactcctttaactttatctgttactattggtcaacctgcttctatttcttgtaaatcttctcaatctttattagattctgatggtaaaacttatttaaattggttattacaacgtcctggtcaatctcctaaacgtttaatttatttagtttctaaattagattctggtgttcctgatcgttttactggttctggttctggtactgattttactttaaaaatttctcgtgttgaagctgaagatttaggtgtttattattgttggcaaggtactcattttcctcatacttttggtggtggtactaaattagaaattaaa

SEQ ID NO: 571 - protein, 8 aa, synthetic construct
GFTFTDYF

SEQ ID NO: 572 - protein, 10 aa, synthetic construct
IRNKANGYTT

SEQ ID NO: 573 - protein, 15 aa, synthetic construct
ARPSYYDYNGTWFAY

SEQ ID NO: 574 - protein, 124 aa, synthetic construct
EVQLVESGGGLVQPGGSLRLSCATSGFTFTDYFLSWVRQPPGKALEWLGFIRNKANGYTTEYSASVKGRFTISRDNSQSILYLQMNTLRAEDSATYYCARPSYYDYNGTWFAYWGQGTLVTVSA

SEQ ID NO: 575 - DNA, 372 bp, synthetic construct
  source 1..372: mol_type = other DNA
gaagttcaattagttgaatctggtggtggtttagttcaacctggtggttctttacgtttatcttgtgctacttctggttttacttttactgattattttttatcttgggttcgtcaacctcctggtaaagctttagaatggttaggttttattcgtaataaagctaatggttatactactgaatattctgcttctgttaaaggtcgttttactatttctcgtgataattctcaatctattttatatttacaaatgaatactttacgtgctgaagattctgctacttattattgtgctcgtccttcttattatgattataatggtacttggtttgcttattggggtcaaggtactttagttactgtttctgct

SEQ ID NO: 576 - protein, 6 aa, synthetic construct
QDVSSA

SEQ ID NO: 577 - skipped

SEQ ID NO: 578 - protein, 9 aa, synthetic construct
QQHYSPPWT

SEQ ID NO: 579 - protein, 107 aa, synthetic construct
DIVMTQSHKFMSTSVGDRVSITCKASQDVSSAVAWYQQKPRQSPKLLIYSASYRYTGVPDRFTGSGSGTDFTFTISSVQAEDLAVYYCQQHYSPPWTFGGGTKLEMK

SEQ ID NO: 580 - DNA, 321 bp, synthetic construct
  source 1..321: mol_type = other DNA
gatattgttatgactcaatctcataaatttatgtctacttctgttggtgatcgtgtttctattacttgtaaagcttctcaagatgtttcttctgctgttgcttggtatcaacaaaaacctcgtcaatctcctaaattattaatttattctgcttcttatcgttatactggtgttcctgatcgttttactggttctggttctggtactgattttacttttactatttcttctgttcaagctgaagatttagctgtttattattgtcaacaacattattctcctccttggacttttggtggtggtactaaattagaaatgaaa

SEQ ID NO: 581 - protein, 8 aa, synthetic construct
GFAFSNYA

SEQ ID NO: 582 - protein, 8 aa, synthetic construct
ISNGGGYT

SEQ ID NO: 583 - protein, 13 aa, synthetic construct
ARHGYNWERWFAY

SEQ ID NO: 584 - protein, 120 aa, synthetic construct
EVKIEESGGGLVKPGGSLKLSCAASGFAFSNYAMSWVRQTPEKRLEWVATISNGGGYTFYTDSVKGRFTISRDNAKNTLYLQMSSLRSEDSAMYYCARHGYNWERWFAYWGQGTLVTVSA

SEQ ID NO: 585 - DNA, 360 bp, synthetic construct
  source 1..360: mol_type = other DNA
gaagttaaaattgaagaatctggtggtggtttagttaaacctggtggttctttaaaattatcttgtgctgcttctggttttgctttttctaattatgctatgtcttgggttcgtcaaactcctgaaaaacgtttagaatgggttgctactatttctaatggtggtggttatactttttatactgattctgttaaaggtcgttttactatttctcgtgataatgctaaaaatactttatatttacaaatgtcttctttacgttctgaagattctgctatgtattattgtgctcgtcatggttataattgggaacgttggtttgcttattggggtcaaggtactttagttactgtttctgct

SEQ ID NO: 586 - protein, 6 aa, synthetic construct
QDVGTA

SEQ ID NO: 587 - skipped

SEQ ID NO: 588 - protein, 9 aa, synthetic construct
QQHYSTPYT

SEQ ID NO: 589 - protein, 107 aa, synthetic construct
DIVMTQSHKFMSTSVGDRVSITCKASQDVGTAVAWYQQKPGQSPKLLIYWASTRHTGVPDRFTGSGSGTDFTLTISSVQAEDLAVYYCQQHYSTPYTFGGGTKLEIK

SEQ ID NO: 590 - DNA, 321 bp, synthetic construct
  source 1..321: mol_type = other DNA
gatattgttatgactcaatctcataaatttatgtctacttctgttggtgatcgtgtttctattacttgtaaagcttctcaagatgttggtactgctgttgcttggtatcaacaaaaacctggtcaatctcctaaattattaatttattgggcttctactcgtcatactggtgttcctgatcgttttactggttctggttctggtactgattttactttaactatttcttctgttcaagctgaagatttagctgtttattattgtcaacaacattattctactccttatacttttggtggtggtactaaattagaaattaaa

SEQ ID NO: 591 - protein, 8 aa, synthetic construct
GFTFTDYY

SEQ ID NO: 592 - protein, 10 aa, synthetic construct
IRNKANGYTT

SEQ ID NO: 593 - protein, 13 aa, synthetic construct
ARDRGWLRGYFDV

SEQ ID NO: 594 - protein, 122 aa, synthetic construct
EVQLVESGGGLVQPGGSLRLSCATSGFTFTDYYMIWVRQPPGKALEWLGFIRNKANGYTTEYSASVKGRFTISRDNSQSILYLQMNTLRAEDSATYYCARDRGWLRGYFDVWGAGTTVTVSS

SEQ ID NO: 595 - DNA, 366 bp, synthetic construct
  source 1..366: mol_type = other DNA
gaagttcaattagttgaatctggtggtggtttagttcaacctggtggttctttacgtttatcttgtgctacttctggttttacttttactgattattatatgatttgggttcgtcaacctcctggtaaagctttagaatggttaggttttattcgtaataaagctaatggttatactactgaatattctgcttctgttaaaggtcgttttactatttctcgtgataattctcaatctattttatatttacaaatgaatactttacgtgctgaagattctgctacttattattgtgctcgtgatcgtggttggttacgtggttattttgatgtttggggtgctggtactactgttactgtttcttct

SEQ ID NO: 596 - protein, 11 aa, synthetic construct
QSLVHSNGNTY

SEQ ID NO: 597 - skipped

SEQ ID NO: 598 - protein, 9 aa, synthetic construct
SQSTHVPWT

SEQ ID NO: 599 - protein, 112 aa, synthetic construct
DVVMTQTPLSLPVSLGDQASISCRSSQSLVHSNGNTYLHWYLQKPGQSPKLLIYKVSNRFSGVPDRFSGSGSGTDFTLKISRVEAEDLGVYFCSQSTHVPWTFGGGTKLEIK

SEQ ID NO: 600 - DNA, 336 bp, synthetic construct
  source 1..336: mol_type = other DNA
gatgttgttatgactcaaactcctttatctttacctgtttctttaggtgatcaagcttctatttcttgtcgttcttctcaatctttagttcattctaatggtaatacttatttacattggtatttacaaaaacctggtcaatctcctaaattattaatttataaagtttctaatcgtttttctggtgttcctgatcgtttttctggttctggttctggtactgattttactttaaaaatttctcgtgttgaagctgaagatttaggtgtttatttttgttctcaatctactcatgttccttggacttttggtggtggtactaaattagaaattaaa

SEQ ID NO: 601 - protein, 9 aa, synthetic construct
GYSITSDYA

SEQ ID NO: 602 - protein, 7 aa, synthetic construct
ISYSGST

SEQ ID NO: 603 - protein, 12 aa, synthetic construct
ASWGTTVGYFDY

SEQ ID NO: 604 - protein, 119 aa, synthetic construct
EVQLQESGPGLVKPSQSLSLTCTVTGYSITSDYAWNWIRQFPGNKLEWMGYISYSGSTSYNPSLKSRISITRDTSKNQFFLQLNSVTTEDTATYYCASWGTTVGYFDYWGQGTTLTVSS

SEQ ID NO: 605 - DNA, 357 bp, synthetic construct
  source 1..357: mol_type = other DNA
gaagttcaattacaagaatctggtcctggtttagttaaaccttctcaatctttatctttaacttgtactgttactggttattctattacttctgattatgcttggaattggattcgtcaatttcctggtaataaattagaatggatgggttatatttcttattctggttctacttcttataatccttctttaaaatctcgtatttctattactcgtgatacttctaaaaatcaattttttttacaattaaattctgttactactgaagatactgctacttattattgtgcttcttggggtactactgttggttattttgattattggggtcaaggtactactttaactgtttcttct

SEQ ID NO: 606 - protein, 11 aa, synthetic construct
QSLLDSDGKTY

SEQ ID NO: 607 - skipped

SEQ ID NO: 608 - protein, 9 aa, synthetic construct
WQGTHFPWT

SEQ ID NO: 609 - protein, 112 aa, synthetic construct
DIVMTQTPLTLSVTIGQPASISCKSSQSLLDSDGKTYLNWLLQRPGQSPKRLIYLVSKLDSGVPDRFTGSGSGTDFTLKISRVEAEDLGVYYCWQGTHFPWTFGGGTKLEIK

SEQ ID NO: 610 - DNA, 336 bp, synthetic construct
  source 1..336: mol_type = other DNA
gatattgttatgactcaaactcctttaactttatctgttactattggtcaacctgcttctatttcttgtaaatcttctcaatctttattagattctgatggtaaaacttatttaaattggttattacaacgtcctggtcaatctcctaaacgtttaatttatttagtttctaaattagattctggtgttcctgatcgttttactggttctggttctggtactgattttactttaaaaatttctcgtgttgaagctgaagatttaggtgtttattattgttggcaaggtactcattttccttggacttttggtggtggtactaaattagaaattaaa

SEQ ID NO: 611 - protein, 8 aa, synthetic construct
GYTFTDYY

SEQ ID NO: 612 - protein, 8 aa, synthetic construct
IYPGSGNT

SEQ ID NO: 613 - protein, 12 aa, synthetic construct
ARERDGYYHFDY

SEQ ID NO: 614 - protein, 119 aa, synthetic construct
QVQLQQSGPELVKPGASVKISCKASGYTFTDYYINWVKQKPGQGLEWIGWIYPGSGNTKYNEKFKGKATLTVDTSSSTAYMQLSSLTSEDTAVYFCARERDGYYHFDYWGQGTTLTVSS

SEQ ID NO: 615 - DNA, 357 bp, synthetic construct
  source 1..357: mol_type = other DNA
caagttcaattacaacaatctggtcctgaattagttaaacctggtgcttctgttaaaatttcttgtaaagcttctggttatacttttactgattattatattaattgggttaaacaaaaacctggtcaaggtttagaatggattggttggatttatcctggttctggtaatactaaatataatgaaaaatttaaaggtaaagctactttaactgttgatacttcttcttctactgcttatatgcaattatcttctttaacttctgaagatactgctgtttatttttgtgctcgtgaacgtgatggttattatcattttgattattggggtcaaggtactactttaactgtttcttct

SEQ ID NO: 616 - protein, 11 aa, synthetic construct
QSLVHSNGNTY

SEQ ID NO: 617 - skipped

SEQ ID NO: 618 - protein, 9 aa, synthetic construct
QQYYSYPWT

SEQ ID NO: 619 - protein, 112 aa, synthetic construct
DVVVTQTPLSLPVSLGDQASISCRSSQSLVHSNGNTYLHWYLQKPGQSPKLLIYKVSNRFSGVPDRFSGSGSGTDFTLTISNVQSEDLAEYFCQQYYSYPWTFGGGTKLEIK

SEQ ID NO: 620 - DNA, 336 bp, synthetic construct
  source 1..336: mol_type = other DNA
gatgttgttgttactcaaactcctttatctttacctgtttctttaggtgatcaagcttctatttcttgtcgttcttctcaatctttagttcattctaatggtaatacttatttacattggtatttacaaaaacctggtcaatctcctaaattattaatttataaagtttctaatcgtttttctggtgttcctgatcgtttttctggttctggttctggtactgattttactttaactatttctaatgttcaatctgaagatttagctgaatatttttgtcaacaatattattcttatccttggacttttggtggtggtactaaattagaaattaaa

SEQ ID NO: 621 - protein, 8 aa, synthetic construct
GFTFTDYY

SEQ ID NO: 622 - protein, 10 aa, synthetic construct
IGNKAKGYTT

SEQ ID NO: 623 - protein, 10 aa, synthetic construct
ARNGYGWFVY

SEQ ID NO: 624 - protein, 119 aa, synthetic construct
EVMLVESGGGLVQPGGSLRLSCATSGFTFTDYYMSWVRQPPGKALEWLGFIGNKAKGYTTEYSASVKGRFTISRDNSQSILYLQMNTLRAEDSATYYCARNGYGWFVYWGQGTLVTVSA

SEQ ID NO: 625 - DNA, 357 bp, synthetic construct
  source 1..357: mol_type = other DNA
gaagttatgttagttgaatctggtggtggtttagttcaacctggtggttctttacgtttatcttgtgctacttctggttttacttttactgattattatatgtcttgggttcgtcaacctcctggtaaagctttagaatggttaggttttattggtaataaagctaaaggttatactactgaatattctgcttctgttaaaggtcgttttactatttctcgtgataattctcaatctattttatatttacaaatgaatactttacgtgctgaagattctgctacttattattgtgctcgtaatggttatggttggtttgtttattggggtcaaggtactttagttactgtttctgct

SEQ ID NO: 626 - protein, 11 aa, synthetic construct
QSLVHSNGNTY

SEQ ID NO: 627 - skipped

SEQ ID NO: 628 - protein, 10 aa, synthetic construct
SQSTHVPPYT

SEQ ID NO: 629 - protein, 113 aa, synthetic construct; identical to SEQ ID NO: 399

SEQ ID NO: 630 - DNA, 339 bp, synthetic construct
  source 1..339: mol_type = other DNA
gatgttgttatgactcaaactcctttatctttacctgtttctttaggtgatcaagcttctatttcttgtcgttcttctcaatctttagttcattctaatggtaatacttatttacattggtatttacaaaaacctggtcaatctcctaaattattaatttataaagtttctaatcgtttttctggtgttcctgatcgtttttctggttctggttctggtactgattttactttaaaaatttctcgtgttgaagctgaagatttaggtgtttatttttgttctcaatctactcatgttcctccttatacttttggtggtggtactaaattagaaattaaa

SEQ ID NO: 631 - protein, 8 aa, synthetic construct
GFTFSSYA

SEQ ID NO: 632 - protein, 8 aa, synthetic construct
ISSGGGYT

SEQ ID NO: 633 - protein, 10 aa, synthetic construct
ARGFITIFDY

SEQ ID NO: 634 - protein, 117 aa, synthetic construct
EVKLVESGGGLVQPGGSLKLSCAASGFTFSSYAMSWVRQSPEKKLEWVAEISSGGGYTYYPDSVKGRFTISRDNAKNTLYLQMSSLRSEDTATYYCARGFITIFDYWGQGTTVTVSS

SEQ ID NO: 635 - DNA, 351 bp, synthetic construct
  source 1..351: mol_type = other DNA
gaagttaaattagttgaatctggtggtggtttagttcaacctggtggttctttaaaattatcttgtgctgcttctggttttactttttcttcttatgctatgtcttgggttcgtcaatctcctgaaaaaaaattagaatgggttgctgaaatttcttctggtggtggttatacttattatcctgattctgttaaaggtcgttttactatttctcgtgataatgctaaaaatactttatatttacaaatgtcttctttacgttctgaagatactgctacttattattgtgctcgtggttttattactatttttgattattggggtcaaggtactactgttactgtttcttct

SEQ ID NO: 636 - protein, 11 aa, synthetic construct
QSLVHSNGNTY

SEQ ID NO: 637 - skipped

SEQ ID NO: 638 - protein, 10 aa, synthetic construct
SQSTHVPPYT

SEQ ID NO: 639 - protein, 113 aa, synthetic construct; identical to SEQ ID NO: 399

SEQ ID NO: 640 - DNA, 339 bp, synthetic construct; identical to SEQ ID NO: 630
  source 1..339: mol_type = other DNA

SEQ ID NO: 641 - protein, 8 aa, synthetic construct
GFPFGNYL

SEQ ID NO: 642 - protein, 8 aa, synthetic construct
ISGGGVST

SEQ ID NO: 643 - protein, 12 aa, synthetic construct
ARGPSSWPAFDV

SEQ ID NO: 644 - protein, 119 aa, synthetic construct; identical to SEQ ID NO: 434

SEQ ID NO: 645 - DNA, 357 bp, synthetic construct; identical to SEQ ID NO: 545
  source 1..357: mol_type = other DNA

SEQ ID NO: 646 - protein, 6 aa, synthetic construct
QSISSY

SEQ ID NO: 647 - skipped

SEQ ID NO: 648 - protein, 9 aa, synthetic construct
QQSYSTPPT

SEQ ID NO: 649 - protein, 107 aa, synthetic construct
DIQMTQSPSSLSASVGDRVTITCRASQSISSYLNWYQQKPGKAPKLLIYGWSSLQSGVPSRFSGSGSGTDFTLTISSLQPEDFATYYCQQSYSTPPTFGQGTKVEIK

SEQ ID NO: 650 - DNA, 321 bp, synthetic construct
  source 1..321: mol_type = other DNA
gatattcaaatgactcaatctccttcttctttatctgcttctgttggtgatcgtgttactattacttgtcgtgcttctcaatctatttcttcttatttaaattggtatcaacaaaaacctggtaaagctcctaaattattaatttatggttggtcttctttacaatctggtgttccttctcgtttttctggttctggttctggtactgattttactttaactatttcttctttacaacctgaagattttgctacttattattgtcaacaatcttattctactcctcctacttttggtcaaggtactaaagttgaaattaaa

SEQ ID NO: 651 - protein, 8 aa, synthetic construct
GFTFTDYY

SEQ ID NO: 652 - protein, 10 aa, synthetic construct
IRNKANGYTT

SEQ ID NO: 653 - protein, 13 aa, synthetic construct
ARDRGWLRGYFDV

SEQ ID NO: 654 - protein, 122 aa, synthetic construct; identical to SEQ ID NO: 594

SEQ ID NO: 655 - DNA, 366 bp, synthetic construct; identical to SEQ ID NO: 595
  source 1..366: mol_type = other DNA

SEQ ID NO: 656 - protein, 6 aa, synthetic construct
QSISSY

SEQ ID NO: 657 - skipped

SEQ ID NO: 658 - protein, 9 aa, synthetic construct
QQSYSGPPT

SEQ ID NO: 659 - protein, 107 aa, synthetic construct
DIQMTQSPSSLSASVGDRVTITCRASQSISSYLNWYQQKPGKAPKLLIYAASSLQSGVPSRFSGSGSGTDFTLTISSLQPEDFATYYCQQSYSGPPTFGQGTKVEIK

SEQ ID NO: 660 - DNA, 321 bp, synthetic construct
  source 1..321: mol_type = other DNA
gatattcaaatgactcaatctccttcttctttatctgcttctgttggtgatcgtgttactattacttgtcgtgcttctcaatctatttcttcttatttaaattggtatcaacaaaaacctggtaaagctcctaaattattaatttatgctgcttcttctttacaatctggtgttccttctcgtttttctggttctggttctggtactgattttactttaactatttcttctttacaacctgaagattttgctacttattattgtcaacaatcttattctggtcctcctacttttggtcaaggtactaaagttgaaattaaa

SEQ ID NO: 661 - protein, 8 aa, synthetic construct
GYTFNIYS

SEQ ID NO: 662 - protein, 10 aa, synthetic construct
IRSKYNNYAT

SEQ ID NO: 663 - protein, 16 aa, synthetic construct
VRHGNFGNSYVSWFAY

SEQ ID NO: 664 - protein, 125 aa, synthetic construct
EVQLVESGGGLVQPGGSLRLSCAASGYTFNIYSMNWVRQAPGKGLEWVGRIRSKYNNYATYYADSVKGRFTISRDDSKNTLYLQMNSLRAEDTAVYYCVRHGNFGNSYVSWFAYWGQGTLVTVSS

SEQ ID NO: 665 - DNA, 375 bp, synthetic construct
  source 1..375: mol_type = other DNA
gaagttcaattagttgaatctggtggtggtttagttcaacctggtggttctttacgtttatcttgtgctgcttctggttatacttttaatatttattctatgaattgggttcgtcaagctcctggtaaaggtttagaatgggttggtcgtattcgttctaaatataataattatgctacttattatgctgattctgttaaaggtcgttttactatttctcgtgatgattctaaaaatactttatatttacaaatgaattctttacgtgctgaagatactgctgtttattattgtgttcgtcatggtaattttggtaattcttatgtttcttggtttgcttattggggtcaaggtactttagttactgtttcttct

SEQ ID NO: 666 - protein, 9 aa, synthetic construct
TGAVTTSNY

SEQ ID NO: 667 - skipped

SEQ ID NO: 668 - protein, 9 aa, synthetic construct
ALWYSNLWV

SEQ ID NO: 669 - protein, 110 aa, synthetic construct
DIQMTQSPSSLSASVGDRVTITCRSSTGAVTTSNYANWVQQKPGKAPKGLIGGTNKRAPGVPARFSGSGSGTDFTLTISSLQPEDFATYYCALWYSNLWVFGQGTKVEIK

SEQ ID NO: 670 - DNA, 330 bp, synthetic construct
  source 1..330: mol_type = other DNA
gatattcaaatgactcaatctccttcttctttatctgcttctgttggtgatcgtgttactattacttgtcgttcttctactggtgctgttactacttctaattatgctaattgggttcaacaaaaacctggtaaagctcctaaaggtttaattggtggtactaataaacgtgctcctggtgttcctgctcgtttttctggttctggttctggtactgattttactttaactatttcttctttacaacctgaagattttgctacttattattgtgctttatggtattctaatttatgggtttttggtcaaggtactaaagttgaaattaaa

SEQ ID NO: 671 - protein, 8 aa, synthetic construct
GFGFNAYA

SEQ ID NO: 672 - protein, 10 aa, synthetic construct
IRSKYNNYAT

SEQ ID NO: 673 - protein, 16 aa, synthetic construct
VRHGNFGNSYVSWFAY

SEQ ID NO: 674 - protein, 125 aa, synthetic construct
EVQLVESGGGLVQPGGSLRLSCAASGFGFNAYAMNWVRQAPGKGLEWVGRIRSKYNNYATYYADSVKGRFTISRDDSKNTLYLQMNSLRAEDTAVYYCVRHGNFGNSYVSWFAYWGQGTLVTVSS

SEQ ID NO: 675 - DNA, 375 bp, synthetic construct
  source 1..375: mol_type = other DNA
gaagttcaattagttgaatctggtggtggtttagttcaacctggtggttctttacgtttatcttgtgctgcttctggttttggttttaatgcttatgctatgaattgggttcgtcaagctcctggtaaaggtttagaatgggttggtcgtattcgttctaaatataataattatgctacttattatgctgattctgttaaaggtcgttttactatttctcgtgatgattctaaaaatactttatatttacaaatgaattctttacgtgctgaagatactgctgtttattattgtgttcgtcatggtaattttggtaattcttatgtttcttggtttgcttattggggtcaaggtactttagttactgtttcttct

SEQ ID NO: 676 - protein, 9 aa, synthetic construct
TGAVTTSNY

SEQ ID NO: 677 - skipped

SEQ ID NO: 678 - protein, 9 aa, synthetic construct
ALWYSNLWV

SEQ ID NO: 679 - protein, 110 aa, synthetic construct; identical to SEQ ID NO: 669

SEQ ID NO: 680 - DNA, 330 bp, synthetic construct; identical to SEQ ID NO: 670
  source 1..330: mol_type = other DNA

SEQ ID NO: 681 - protein, 8 aa, synthetic construct
RFTFETYA

SEQ ID NO: 682 - protein, 10 aa, synthetic construct
IRSKYNNYAT

SEQ ID NO: 683 - protein, 16 aa, synthetic construct
VRHGNFGNSYVSWFAY

SEQ ID NO: 684 - protein, 125 aa, synthetic construct
EVQLVESGGGLVQPGGSLRLSCAASRFTFETYAMNWVRQAPGKGLEWVGRIRSKYNNYATYYADSVKGRFTISRDDSKNTLYLQMNSLRAEDTAVYYCVRHGNFGNSYVSWFAYWGQGTLVTVSS

SEQ ID NO: 685 - DNA, 375 bp, synthetic construct
  source 1..375: mol_type = other DNA
gaagttcaattagttgaatctggtggtggtttagttcaacctggtggttctttacgtttatcttgtgctgcttctcgttttacttttgaaacttatgctatgaattgggttcgtcaagctcctggtaaaggtttagaatgggttggtcgtattcgttctaaatataataattatgctacttattatgctgattctgttaaaggtcgttttactatttctcgtgatgattctaaaaatactttatatttacaaatgaattctttacgtgctgaagatactgctgtttattattgtgttcgtcatggtaattttggtaattcttatgtttcttggtttgcttattggggtcaaggtactttagttactgtttcttct

SEQ ID NO: 686 - protein, 9 aa, synthetic construct
TGAVTTSNY

SEQ ID NO: 687 - skipped

SEQ ID NO: 688 - protein, 9 aa, synthetic construct
ALWYSNLWV

SEQ ID NO: 689 - protein, 110 aa, synthetic construct; identical to SEQ ID NO: 669

SEQ ID NO: 690 - DNA, 330 bp, synthetic construct; identical to SEQ ID NO: 670
  source 1..330: mol_type = other DNA

SEQ ID NO: 691 - protein, 8 aa, synthetic construct
GFAFNAYA

SEQ ID NO: 692 - protein, 10 aa, synthetic construct
IRSKYNNYAT

SEQ ID NO: 693 - protein, 16 aa, synthetic construct
VRHGNFGNSYVSWFAY

SEQ ID NO: 694 - protein, 125 aa, synthetic construct
EVQLVESGGGLVQPGGSLRLSCAASGFAFNAYAMNWVRQAPGKGLEWVGRIRSKYNNYATYYADSVKGRFTISRDDSKNTLYLQMNSLRAEDTAVYYCVRHGNFGNSYVSWFAYWGQGTLVTVSS

SEQ ID NO: 695 - DNA, 375 bp, synthetic construct
  source 1..375: mol_type = other DNA
gaagttcaattagttgaatctggtggtggtttagttcaacctggtggttctttacgtttatcttgtgctgcttctggttttgcttttaatgcttatgctatgaattgggttcgtcaagctcctggtaaaggtttagaatgggttggtcgtattcgttctaaatataataattatgctacttattatgctgattctgttaaaggtcgttttactatttctcgtgatgattctaaaaatactttatatttacaaatgaattctttacgtgctgaagatactgctgtttattattgtgttcgtcatggtaattttggtaattcttatgtttcttggtttgcttattggggtcaaggtactttagttactgtttcttct

SEQ ID NO: 696 - protein, 9 aa, synthetic construct
TGAVTTSNY

SEQ ID NO: 697 - skipped

SEQ ID NO: 698 - protein, 9 aa, synthetic construct
ALWYSNLWV

SEQ ID NO: 699 - protein, 110 aa, synthetic construct; identical to SEQ ID NO: 669

SEQ ID NO: 700 - DNA, 330 bp, synthetic construct; identical to SEQ ID NO: 670
  source 1..330: mol_type = other DNA

SEQ ID NO: 701 - protein, 8 aa, synthetic construct
DFTFETYA

SEQ ID NO: 702 - protein, 10 aa, synthetic construct
IRSKYNNYAT

SEQ ID NO: 703 - protein, 16 aa, synthetic construct
VRHGNFGNSYVSWFAY

SEQ ID NO: 704 - protein, 125 aa, synthetic construct
EVQLVESGGGLVQPGGSLRLSCAASDFTFETYAMNWVRQAPGKGLEWVGRIRSKYNNYATYYADSVKGRFTISRDDSKNTLYLQMNSLRAEDTAVYYCVRHGNFGNSYVSWFAYWGQGTLVTVSS

SEQ ID NO: 705 - DNA, 375 bp, synthetic construct
  source 1..375: mol_type = other DNA
gaagttcaattagttgaatctggtggtggtttagttcaacctggtggttctttacgtttatcttgtgctgcttctgattttacttttgaaacttatgctatgaattgggttcgtcaagctcctggtaaaggtttagaatgggttggtcgtattcgttctaaatataataattatgctacttattatgctgattctgttaaaggtcgttttactatttctcgtgatgattctaaaaatactttatatttacaaatgaattctttacgtgctgaagatactgctgtttattattgtgttcgtcatggtaattttggtaattcttatgtttcttggtttgcttattggggtcaaggtactttagttactgtttcttct

SEQ ID NO: 706 - protein, 9 aa, synthetic construct
TGAVTTSNY

SEQ ID NO: 707 - skipped

SEQ ID NO: 708 - protein, 9 aa, synthetic construct
ALWYSNLWV

SEQ ID NO: 709 - protein, 110 aa, synthetic construct; identical to SEQ ID NO: 669

SEQ ID NO: 710 - DNA, 330 bp, synthetic construct; identical to SEQ ID NO: 670
  source 1..330: mol_type = other DNA

SEQ ID NO: 711 - protein, 8 aa, synthetic construct
GFAFNVYA

SEQ ID NO: 712 - protein, 10 aa, synthetic construct
IRSKYNNYAT

SEQ ID NO: 713 - protein, 16 aa, synthetic construct
VRHGNFGNSYVSWFAY

SEQ ID NO: 714 - protein, 125 aa, synthetic construct
EVQLVESGGGLVQPGGSLRLSCAASGFAFNVYAMNWVRQAPGKGLEWVGRIRSKYNNYATYYADSVKGRFTISRDDSKNTLYLQMNSLRAEDTAVYYCVRHGNFGNSYVSWFAYWGQGTLVTVSS

SEQ ID NO: 715 - DNA, 375 bp, synthetic construct
  source 1..375: mol_type = other DNA
gaagttcaattagttgaatctggtggtggtttagttcaacctggtggttctttacgtttatcttgtgctgcttctggttttgcttttaatgtttatgctatgaattgggttcgtcaagctcctggtaaaggtttagaatgggttggtcgtattcgttctaaatataataattatgctacttattatgctgattctgttaaaggtcgttttactatttctcgtgatgattctaaaaatactttatatttacaaatgaattctttacgtgctgaagatactgctgtttattattgtgttcgtcatggtaattttggtaattcttatgtttcttggtttgcttattggggtcaaggtactttagttactgtttcttct

SEQ ID NO: 716 - protein, 9 aa, synthetic construct
TGAVTTSNY

SEQ ID NO: 717 - skipped

SEQ ID NO: 718 - protein, 9 aa, synthetic construct
ALWYSNLWV

SEQ ID NO: 719 - protein, 110 aa, synthetic construct; identical to SEQ ID NO: 669

SEQ ID NO: 720 - DNA, 330 bp, synthetic construct; identical to SEQ ID NO: 670
  source 1..330: mol_type = other DNA

SEQ ID NO: 721 - protein, 8 aa, synthetic construct
GFDFNAYA

SEQ ID NO: 722 - protein, 10 aa, synthetic construct
IRSKYNNYAT

SEQ ID NO: 723 - protein, 16 aa, synthetic construct
VRHGNFGNSYVSWFAY

SEQ ID NO: 724 - protein, 125 aa, synthetic construct
EVQLVESGGGLVQPGGSLRLSCAASGFDFNAYAMNWVRQAPGKGLEWVGRIRSKYNNYATYYADSVKGRFTISRDDSKNTLYLQMNSLRAEDTAVYYCVRHGNFGNSYVSWFAYWGQGTLVTVSS

SEQ ID NO: 725 - DNA, 375 bp, synthetic construct
  source 1..375: mol_type = other DNA
gaagttcaattagttgaatctggtggtggtttagttcaacctggtggttctttacgtttatcttgtgctgcttctggttttgattttaatgcttatgctatgaattgggttcgtcaagctcctggtaaaggtttagaatgggttggtcgtattcgttctaaatataataattatgctacttattatgctgattctgttaaaggtcgttttactatttctcgtgatgattctaaaaatactttatatttacaaatgaattctttacgtgctgaagatactgctgtttattattgtgttcgtcatggtaattttggtaattcttatgtttcttggtttgcttattggggtcaaggtactttagttactgtttcttct

SEQ ID NO: 726 - protein, 9 aa, synthetic construct
TGAVTTSNY

SEQ ID NO: 727 - skipped

SEQ ID NO: 728 - protein, 9 aa, synthetic construct
ALWYSNLWV

SEQ ID NO: 729 - protein, 110 aa, synthetic construct; identical to SEQ ID NO: 669

SEQ ID NO: 730 - DNA, 330 bp, synthetic construct; identical to SEQ ID NO: 670
  source 1..330: mol_type = other DNA

SEQ ID NO: 731 - protein, 8 aa, synthetic construct
GFTFNIQA

SEQ ID NO: 732 - protein, 10 aa, synthetic construct
IRSKYNNYAT

SEQ ID NO: 733 - protein, 16 aa, synthetic construct
VRHGNFGNSYVSWFAY

SEQ ID NO: 734 - protein, 125 aa, synthetic construct
EVQLVESGGGLVQPGGSLRLSCAASGFTFNIQAMNWVRQAPGKGLEWVGRIRSKYNNYATYYADSVKGRFTISRDDSKNTLYLQMNSLRAEDTAVYYCVRHGNFGNSYVSWFAYWGQGTLVTVSS

SEQ ID NO: 735 - DNA, 375 bp, synthetic construct
  source 1..375: mol_type = other DNA
gaagttcaattagttgaatctggtggtggtttagttcaacctggtggttctttacgtttatcttgtgctgcttctggttttacttttaatattcaagctatgaattgggttcgtcaagctcctggtaaaggtttagaatgggttggtcgtattcgttctaaatataataattatgctacttattatgctgattctgttaaaggtcgttttactatttctcgtgatgattctaaaaatactttatatttacaaatgaattctttacgtgctgaagatactgctgtttattattgtgttcgtcatggtaattttggtaattcttatgtttcttggtttgcttattggggtcaaggtactttagttactgtttcttct

SEQ ID NO: 736 - protein, 9 aa, synthetic construct
TGAVTTSNY

SEQ ID NO: 737 - skipped

SEQ ID NO: 738 - protein, 9 aa, synthetic construct
ALWYSNLWV

SEQ ID NO: 739 - protein, 110 aa, synthetic construct; identical to SEQ ID NO: 669

SEQ ID NO: 740 - DNA, 330 bp, synthetic construct; identical to SEQ ID NO: 670
  source 1..330: mol_type = other DNA

SEQ ID NO: 741 - protein, 8 aa, synthetic construct
GFTFETYA

SEQ ID NO: 742 - protein, 10 aa, synthetic construct
IRSKYNNYAT

SEQ ID NO: 743 - protein, 16 aa, synthetic construct
VRHGNFGNSYVSWFAY

SEQ ID NO: 744 - protein, 125 aa, synthetic construct
EVQLVESGGGLVQPGGSLRLSCAASGFTFETYAMNWVRQAPGKGLEWVGRIRSKYNNYATYYADSVKGRFTISRDDSKNTLYLQMNSLRAEDTAVYYCVRHGNFGNSYVSWFAYWGQGTLVTVSS

SEQ ID NO: 745 - DNA, 375 bp, synthetic construct
  source 1..375: mol_type = other DNA
gaagttcaattagttgaatctggtggtggtttagttcaacctggtggttctttacgtttatcttgtgctgcttctggttttacttttgaaacttatgctatgaattgggttcgtcaagctcctggtaaaggtttagaatgggttggtcgtattcgttctaaatataataattatgctacttattatgctgattctgttaaaggtcgttttactatttctcgtgatgattctaaaaatactttatatttacaaatgaattctttacgtgctgaagatactgctgtttattattgtgttcgtcatggtaattttggtaattcttatgtttcttggtttgcttattggggtcaaggtactttagttactgtttcttct

SEQ ID NO: 746 - protein, 9 aa, synthetic construct
TGAVTTSNY

SEQ ID NO: 747 - skipped

SEQ ID NO: 748 - protein, 9 aa, synthetic construct
ALWYSNLWV

SEQ ID NO: 749 - protein, 110 aa, synthetic construct; identical to SEQ ID NO: 669

SEQ ID NO: 750 - DNA, 330 bp, synthetic construct; identical to SEQ ID NO: 670
  source 1..330: mol_type = other DNA

SEQ ID NO: 751 - protein, 8 aa, synthetic construct
GFSFVTYA

SEQ ID NO: 752 - protein, 10 aa, synthetic construct
IRSKYNNYAT

SEQ ID NO: 753 - protein, 16 aa, synthetic construct
VRHGNFGNSYVSWFAY

SEQ ID NO: 754 - protein, 125 aa, synthetic construct
EVQLVESGGGLVQPGGSLRLSCAASGFSFVTYAMNWVRQAPGKGLEWVGRIRSKYNNYATYYADSVKGRFTISRDDSKNTLYLQMNSLRAEDTAVYYCVRHGNFGNSYVSWFAYWGQGTLVTVSS

SEQ ID NO: 755 - DNA, 375 bp, synthetic construct
  source 1..375: mol_type = other DNA
gaagttcaattagttgaatctggtggtggtttagttcaacctggtggttctttacgtttatcttgtgctgcttctggtttttcttttgttacttatgctatgaattgggttcgtcaagctcctggtaaaggtttagaatgggttggtcgtattcgttctaaatataataattatgctacttattatgctgattctgttaaaggtcgttttactatttctcgtgatgattctaaaaatactttatatttacaaatgaattctttacgtgctgaagatactgctgtttattattgtgttcgtcatggtaattttggtaattcttatgtttcttggtttgcttattggggtcaaggtactttagttactgtttcttct

SEQ ID NO: 756 - protein, 9 aa, synthetic construct
TGAVTTSNY

SEQ ID NO: 757 - skipped

SEQ ID NO: 758 - protein, 9 aa, synthetic construct
ALWYSNLWV

SEQ ID NO: 759 - protein, 110 aa, synthetic construct; identical to SEQ ID NO: 669

SEQ ID NO: 760 - DNA, 330 bp, synthetic construct; identical to SEQ ID NO: 670
  source 1..330: mol_type = other DNA

SEQ ID NO: 761 - protein, 8 aa, synthetic construct
EFTFETYA

SEQ ID NO: 762 - protein, 10 aa, synthetic construct
IRSKYNNYAT

SEQ ID NO: 763 - protein, 16 aa, synthetic construct
VRHGNFGNSYVSWFAY

SEQ ID NO: 764 - protein, 125 aa, synthetic construct
EVQLVESGGGLVQPGGSLRLSCAASEFTFETYAMNWVRQAPGKGLEWVGRIRSKYNNYATYYADSVKGRFTISRDDSKNTLYLQMNSLRAEDTAVYYCVRHGNFGNSYVSWFAYWGQGTLVTVSS

SEQ ID NO: 765 - DNA, 375 bp, synthetic construct
  source 1..375: mol_type = other DNA
gaagttcaattagttgaatctggtggtggtttagttcaacctggtggttctttacgtttatcttgtgctgcttctgaatttacttttgaaacttatgctatgaattgggttcgtcaagctcctggtaaaggtttagaatgggttggtcgtattcgttctaaatataataattatgctacttattatgctgattctgttaaaggtcgttttactatttctcgtgatgattctaaaaatactttatatttacaaatgaattctttacgtgctgaagatactgctgtttattattgtgttcgtcatggtaattttggtaattcttatgtttcttggtttgcttattggggtcaaggtactttagttactgtttcttct

SEQ ID NO: 766 - protein, 9 aa, synthetic construct
TGAVTTSNY

SEQ ID NO: 767 - skipped

SEQ ID NO: 768 - protein, 9 aa, synthetic construct
ALWYSNLWV

SEQ ID NO: 769 - protein, 110 aa, synthetic construct; identical to SEQ ID NO: 669

SEQ ID NO: 770 - DNA, 330 bp, synthetic construct; identical to SEQ ID NO: 670
  source 1..330: mol_type = other DNA

SEQ ID NO: 771 - protein, 8 aa, synthetic construct
GFGFNVYA

SEQ ID NO: 772 - protein, 10 aa, synthetic construct
IRSKYNNYAT

SEQ ID NO: 773 - protein, 16 aa, synthetic construct
VRHGNFGNSYVSWFAY

SEQ ID NO: 774 - protein, 125 aa, synthetic construct
EVQLVESGGGLVQPGGSLRLSCAASGFGFNVYAMNWVRQAPGKGLEWVGRIRSKYNNYATYYADSVKGRFTISRDDSKNTLYLQMNSLRAEDTAVYYCVRHGNFGNSYVSWFAYWGQGTLVTVSS

SEQ ID NO: 775 - DNA, 375 bp, synthetic construct
  source 1..375: mol_type = other DNA
gaagttcaattagttgaatctggtggtggtttagttcaacctggtggttctttacgtttatcttgtgctgcttctggttttggttttaatgtttatgctatgaattgggttcgtcaagctcctggtaaaggtttagaatgggttggtcgtattcgttctaaatataataattatgctacttattatgctgattctgttaaaggtcgttttactatttctcgtgatgattctaaaaatactttatatttacaaatgaattctttacgtgctgaagatactgctgtttattattgtgttcgtcatggtaattttggtaattcttatgtttcttggtttgcttattggggtcaaggtactttagttactgtttcttct

SEQ ID NO: 776 - protein, 9 aa, synthetic construct
TGAVTTSNY

SEQ ID NO: 777 - skipped

SEQ ID NO: 778 - protein, 9 aa, synthetic construct
ALWYSNLWV

SEQ ID NO: 779 - protein, 110 aa, synthetic construct; identical to SEQ ID NO: 669

SEQ ID NO: 780 - DNA, 330 bp, synthetic construct; identical to SEQ ID NO: 670
  source 1..330: mol_type = other DNA

SEQ ID NO: 781 - protein, 8 aa, synthetic construct
GFTFYTYI

SEQ ID NO: 782 - protein, 10 aa, synthetic construct
IRSKYNNYAT

SEQ ID NO: 783 - protein, 16 aa, synthetic construct
VRHGNFGNSYVSWFAY

SEQ ID NO: 784 - protein, 125 aa, synthetic construct
EVQLVESGGGLVQPGGSLRLSCAASGFTFYTYIMNWVRQAPGKGLEWVGRIRSKYNNYATYYADSVKGRFTISRDDSKNTLYLQMNSLRAEDTAVYYCVRHGNFGNSYVSWFAYWGQGTLVTVSS

SEQ ID NO: 785 - DNA, 375 bp, synthetic construct
  source 1..375: mol_type = other DNA
gaagttcaattagttgaatctggtggtggtttagttcaacctggtggttctttacgtttatcttgtgctgcttctggttttactttttatacttatattatgaattgggttcgtcaagctcctggtaaaggtttagaatgggttggtcgtattcgttctaaatataataattatgctacttattatgctgattctgttaaaggtcgttttactatttctcgtgatgattctaaaaatactttatatttacaaatgaattctttacgtgctgaagatactgctgtttattattgtgttcgtcatggtaattttggtaattcttatgtttcttggtttgcttattggggtcaaggtactttagttactgtttcttct

SEQ ID NO: 786 - protein, 9 aa, synthetic construct
TGAVTTSNY

SEQ ID NO: 787 - skipped

SEQ ID NO: 788 - protein, 9 aa, synthetic construct
ALWYSNLWV

SEQ ID NO: 789 - protein, 110 aa, synthetic construct; identical to SEQ ID NO: 669

SEQ ID NO: 790 - DNA, 330 bp, synthetic construct; identical to SEQ ID NO: 670
  source 1..330: mol_type = other DNA

SEQ ID NO: 791 - protein, 8 aa, synthetic construct
GYTFNVYA

SEQ ID NO: 792 - protein, 10 aa, synthetic construct
IRSKYNNYAT

SEQ ID NO: 793 - protein, 16 aa, synthetic construct
VRHGNFGNSYVSWFAY

SEQ ID NO: 794 - protein, 125 aa, synthetic construct
EVQLVESGGGLVQPGGSLRLSCAASGYTFNVYAMNWVRQAPGKGLEWVGRIRSKYNNYATYYADSVKGRFTISRDDSKNTLYLQMNSLRAEDTAVYYCVRHGNFGNSYVSWFAYWGQGTLVTVSS

SEQ ID NO: 795 - DNA, 375 bp, synthetic construct
  source 1..375: mol_type = other DNA
gaagttcaattagttgaatctggtggtggtttagttcaacctggtggttctttacgtttatcttgtgctgcttctggttatacttttaatgtttatgctatgaattgggttcgtcaagctcctggtaaaggtttagaatgggttggtcgtattcgttctaaatataataattatgctacttattatgctgattctgttaaaggtcgttttactatttctcgtgatgattctaaaaatactttatatttacaaatgaattctttacgtgctgaagatactgctgtttattattgtgttcgtcatggtaattttggtaattcttatgtttcttggtttgcttattggggtcaaggtactttagttactgtttcttct

SEQ ID NO: 796 - protein, 9 aa, synthetic construct
TGAVTTSNY

SEQ ID NO: 797 - skipped

SEQ ID NO: 798 - protein, 9 aa, synthetic construct
ALWYSNLWV

SEQ ID NO: 799 - protein, 110 aa, synthetic construct; identical to SEQ ID NO: 669

SEQ ID NO: 800 - DNA, 330 bp, synthetic construct; identical to SEQ ID NO: 670
  source 1..330: mol_type = other DNA

SEQ ID NO: 801 - protein, 8 aa, synthetic construct
GFTFNPYA

SEQ ID NO: 802 - protein, 10 aa, synthetic construct
IRSKYNNYAT

SEQ ID NO: 803 - protein, 16 aa, synthetic construct
VRHGNFGNSYVSWFAY

SEQ ID NO: 804 - protein, 125 aa, synthetic construct
EVQLVESGGGLVQPGGSLRLSCAASGFTFNPYAMNWVRQAPGKGLEWVGRIRSKYNNYATYYADSVKGRFTISRDDSKNTLYLQMNSLRAEDTAVYYCVRHGNFGNSYVSWFAYWGQGTLVTVSS

SEQ ID NO: 805 - DNA, 375 bp, synthetic construct
  source 1..375: mol_type = other DNA
gaagttcaattagttgaatctggtggtggtttagttcaacctggtggttctttacgtttatcttgtgctgcttctggttttacttttaatccttatgctatgaattgggttcgtcaagctcctggtaaaggtttagaatgggttggtcgtattcgttctaaatataataattatgctacttattatgctgattctgttaaaggtcgttttactatttctcgtgatgattctaaaaatactttatatttacaaatgaattctttacgtgctgaagatactgctgtttattattgtgttcgtcatggtaattttggtaattcttatgtttcttggtttgcttattggggtcaaggtactttagttactgtttcttct

SEQ ID NO: 806 - protein, 9 aa, synthetic construct
TGAVTTSNY

SEQ ID NO: 807 - skipped

SEQ ID NO: 808 - protein, 9 aa, synthetic construct
ALWYSNLWV

SEQ ID NO: 809 - protein, 110 aa, synthetic construct; identical to SEQ ID NO: 669

SEQ ID NO: 810 - DNA, 330 bp, synthetic construct; identical to SEQ ID NO: 670
  source 1..330: mol_type = other DNA

SEQ ID NO: 811 - protein, 8 aa, synthetic construct
GFTFTTYA

SEQ ID NO: 812 - protein, 10 aa, synthetic construct
IRSKYNNYAT

SEQ ID NO: 813 - protein, 16 aa, synthetic construct
VRHGNFGNSYVSWFAY

SEQ ID NO: 814 - protein, 125 aa, synthetic construct
EVQLVESGGGLVQPGGSLRLSCAASGFTFTTYAMNWVRQAPGKGLEWVGRIRSKYNNYATYYADSVKGRFTISRDDSKNTLYLQMNSLRAEDTAVYYCVRHGNFGNSYVSWFAYWGQGTLVTVSS

SEQ ID NO: 815 - DNA, 375 bp, synthetic construct
  source 1..375: mol_type = other DNA
gaagttcaattagttgaatctggtggtggtttagttcaacctggtggttctttacgtttatcttgtgctgcttctggttttacttttactacttatgctatgaattgggttcgtcaagctcctggtaaaggtttagaatgggttggtcgtattcgttctaaatataataattatgctacttattatgctgattctgttaaaggtcgttttactatttctcgtgatgattctaaaaatactttatatttacaaatgaattctttacgtgctgaagatactgctgtttattattgtgttcgtcatggtaattttggtaattcttatgtttcttggtttgcttattggggtcaaggtactttagttactgtttcttct

SEQ ID NO: 816 - protein, 9 aa, synthetic construct
TGAVTTSNY

SEQ ID NO: 817 - skipped

SEQ ID NO: 818 - protein, 9 aa, synthetic construct
ALWYSNLWV

SEQ ID NO: 819 - protein, 110 aa, synthetic construct; identical to SEQ ID NO: 669

SEQ ID NO: 820 - DNA, 330 bp, synthetic construct; identical to SEQ ID NO: 670
  source 1..330: mol_type = other DNA

SEQ ID NO: 821 - protein, 8 aa, synthetic construct
GFTFNTYA

SEQ ID NO: 822 - protein, 10 aa, synthetic construct
IRSKRSNYAT

SEQ ID NO: 823 - protein, 16 aa, synthetic construct
VRHGNFGNSYVSWFAY

SEQ ID NO: 824 - protein, 125 aa, synthetic construct
EVQLVESGGGLVQPGGSLRLSCAASGFTFNTYAMNWVRQAPGKGLEWVGRIRSKRSNYATYYADSVKGRFTISRDDSKNTLYLQMNSLRAEDTAVYYCVRHGNFGNSYVSWFAYWGQGTLVTVSS

SEQ ID NO: 825 - DNA, 375 bp, synthetic construct
  source 1..375: mol_type = other DNA
gaagttcaattagttgaatctggtggtggtttagttcaacctggtggttctttacgtttatcttgtgctgcttctggttttacttttaatacttatgctatgaattgggttcgtcaagctcctggtaaaggtttagaatgggttggtcgtattcgttctaaacgttctaattatgctacttattatgctgattctgttaaaggtcgttttactatttctcgtgatgattctaaaaatactttatatttacaaatgaattctttacgtgctgaagatactgctgtttattattgtgttcgtcatggtaattttggtaattcttatgtttcttggtttgcttattggggtcaaggtactttagttactgtttcttct

SEQ ID NO: 826 - protein, 9 aa, synthetic construct
TGAVTTSNY

SEQ ID NO: 827 - skipped

SEQ ID NO: 828 - protein, 9 aa, synthetic construct
ALWYSNLWV

SEQ ID NO: 829 - protein, 110 aa, synthetic construct; identical to SEQ ID NO: 669

SEQ ID NO: 830 - DNA, 330 bp, synthetic construct; identical to SEQ ID NO: 670
  source 1..330: mol_type = other DNA

SEQ ID NO: 831 - protein, 8 aa, synthetic construct
GFTFNTYA

SEQ ID NO: 832 - protein, 10 aa, synthetic construct
IRSKGNNYAT

SEQ ID NO: 833 - protein, 16 aa, synthetic construct
VRHGNFGNSYVSWFAY

SEQ ID NO: 834 - protein, 125 aa, synthetic construct
EVQLVESGGGLVQPGGSLRLSCAASGFTFNTYAMNWVRQAPGKGLEWVGRIRSKGNNYATYYADSVKGRFTISRDDSKNTLYLQMNSLRAEDTAVYYCVRHGNFGNSYVSWFAYWGQGTLVTVSS

SEQ ID NO: 835 - DNA, 375 bp, synthetic construct
  source 1..375: mol_type = other DNA
gaagttcaattagttgaatctggtggtggtttagttcaacctggtggttctttacgtttatcttgtgctgcttctggttttacttttaatacttatgctatgaattgggttcgtcaagctcctggtaaaggtttagaatgggttggtcgtattcgttctaaaggtaataattatgctacttattatgctgattctgttaaaggtcgttttactatttctcgtgatgattctaaaaatactttatatttacaaatgaattctttacgtgctgaagatactgctgtttattattgtgttcgtcatggtaattttggtaattcttatgtttcttggtttgcttattggggtcaaggtactttagttactgtttcttct

SEQ ID NO: 836 - protein, 9 aa, synthetic construct
TGAVTTSNY

SEQ ID NO: 837 - skipped

SEQ ID NO: 838 - protein, 9 aa, synthetic construct
ALWYSNLWV

SEQ ID NO: 839 - protein, 110 aa, synthetic construct; identical to SEQ ID NO: 669

SEQ ID NO: 840 - DNA, 330 bp, synthetic construct; identical to SEQ ID NO: 670
  source 1..330: mol_type = other DNA

SEQ ID NO: 841 - protein, 8 aa, synthetic construct
GFTFNTYA

SEQ ID NO: 842 - protein, 10 aa, synthetic construct
IRTKSNNYAV

SEQ ID NO: 843 - protein, 16 aa, synthetic construct
VRHGNFGNSYVSWFAY

SEQ ID NO: 844 - protein, 125 aa, synthetic construct
EVQLVESGGGLVQPGGSLRLSCAASGFTFNTYAMNWVRQAPGKGLEWVGRIRTKSNNYAVYYADSVKGRFTISRDDSKNTLYLQMNSLRAEDTAVYYCVRHGNFGNSYVSWFAYWGQGTLVTVSS

SEQ ID NO: 845 - DNA, 375 bp, synthetic construct
  source 1..375: mol_type = other DNA
gaagttcaattagttgaatctggtggtggtttagttcaacctggtggttctttacgtttatcttgtgctgcttctggttttacttttaatacttatgctatgaattgggttcgtcaagctcctggtaaaggtttagaatgggttggtcgtattcgtactaaatctaataattatgctgtttattatgctgattctgttaaaggtcgttttactatttctcgtgatgattctaaaaatactttatatttacaaatgaattctttacgtgctgaagatactgctgtttattattgtgttcgtcatggtaattttggtaattcttatgtttcttggtttgcttattggggtcaaggtactttagttactgtttcttct

SEQ ID NO: 846 - protein, 9 aa, synthetic construct
TGAVTTSNY

SEQ ID NO: 847 - skipped

SEQ ID NO: 848 - protein, 9 aa, synthetic construct
ALWYSNLWV

SEQ ID NO: 849 - protein, 110 aa, synthetic construct; identical to SEQ ID NO: 669

SEQ ID NO: 850 - DNA, 330 bp, synthetic construct; identical to SEQ ID NO: 670
  source 1..330: mol_type = other DNA

SEQ ID NO: 851 - protein, 8 aa, synthetic construct
GFTFNTYA

SEQ ID NO: 852 - protein, 10 aa, synthetic construct
IKTKHDNYAT

SEQ ID NO: 853 - protein, 16 aa, synthetic construct
VRHGNFGNSYVSWFAY

SEQ ID NO: 854 - protein, 125 aa, synthetic construct
EVQLVESGGGLVQPGGSLRLSCAASGFTFNTYAMNWVRQAPGKGLEWVGRIKTKHDNYATYYADSVKGRFTISRDDSKNTLYLQMNSLRAEDTAVYYCVRHGNFGNSYVSWFAYWGQGTLVTVSS

SEQ ID NO: 855 - DNA, 375 bp, synthetic construct
  source 1..375: mol_type = other DNA
gaagttcaattagttgaatctggtggtggtttagttcaacctggtggttctttacgtttatcttgtgctgcttctggttttacttttaatacttatgctatgaattgggttcgtcaagctcctggtaaaggtttagaatgggttggtcgtattaaaactaaacatgataattatgctacttattatgctgattctgttaaaggtcgttttactatttctcgtgatgattctaaaaatactttatatttacaaatgaattctttacgtgctgaagatactgctgtttattattgtgttcgtcatggtaattttggtaattcttatgtttcttggtttgcttattggggtcaaggtactttagttactgtttcttct

SEQ ID NO: 856 - protein, 9 aa, synthetic construct
TGAVTTSNY

SEQ ID NO: 857 - skipped

SEQ ID NO: 858 - protein, 9 aa, synthetic construct
ALWYSNLWV

SEQ ID NO: 859 - protein, 110 aa, synthetic construct; identical to SEQ ID NO: 669

SEQ ID NO: 860 - DNA, 330 bp, synthetic construct; identical to SEQ ID NO: 670
  source 1..330: mol_type = other DNA

SEQ ID NO: 861 - protein, 8 aa, synthetic construct
GFTFNTYA

SEQ ID NO: 862 - protein, 10 aa, synthetic construct
IRSKNFNYAT

SEQ ID NO: 863 - protein, 16 aa, synthetic construct
VRHGNFGNSYVSWFAY

SEQ ID NO: 864 - protein, 125 aa, synthetic construct
EVQLVESGGGLVQPGGSLRLSCAASGFTFNTYAMNWVRQAPGKGLEWVGRIRSKNFNYATYYADSVKGRFTISRDDSKNTLYLQMNSLRAEDTAVYYCVRHGNFGNSYVSWFAYWGQGTLVTVSS

SEQ ID NO: 865 - DNA, 375 bp, synthetic construct
  source 1..375: mol_type = other DNA
gaagttcaattagttgaatctggtggtggtttagttcaacctggtggttctttacgtttatcttgtgctgcttctggttttacttttaatacttatgctatgaattgggttcgtcaagctcctggtaaaggtttagaatgggttggtcgtattcgttctaaaaattttaattatgctacttattatgctgattctgttaaaggtcgttttactatttctcgtgatgattctaaaaatactttatatttacaaatgaattctttacgtgctgaagatactgctgtttattattgtgttcgtcatggtaattttggtaattcttatgtttcttggtttgcttattggggtcaaggtactttagttactgtttcttct

SEQ ID NO: 866 - protein, 9 aa, synthetic construct
TGAVTTSNY

SEQ ID NO: 867 - skipped

SEQ ID NO: 868 - protein, 9 aa, synthetic construct
ALWYSNLWV

SEQ ID NO: 869 - protein, 110 aa, synthetic construct; identical to SEQ ID NO: 669

SEQ ID NO: 870 - DNA, 330 bp, synthetic construct; identical to SEQ ID NO: 670
  source 1..330: mol_type = other DNA

SEQ ID NO: 871 - protein, 8 aa, synthetic construct
GFTFNTYA

SEQ ID NO: 872 - protein, 10 aa, synthetic construct
VRSKQTNYAT

SEQ ID NO: 873 - protein, 16 aa, synthetic construct
VRHGNFGNSYVSWFAY

SEQ ID NO: 874 - protein, 125 aa, synthetic construct
EVQLVESGGGLVQPGGSLRLSCAASGFTFNTYAMNWVRQAPGKGLEWVGRVRSKQTNYATYYADSVKGRFTISRDDSKNTLYLQMNSLRAEDTAVYYCVRHGNFGNSYVSWFAYWGQGTLVTVSS

SEQ ID NO: 875 - DNA, 375 bp, synthetic construct
  source 1..375: mol_type = other DNA
gaagttcaattagttgaatctggtggtggtttagttcaacctggtggttctttacgtttatcttgtgctgcttctggttttacttttaatacttatgctatgaattgggttcgtcaagctcctggtaaaggtttagaatgggttggtcgtgttcgttctaaacaaactaattatgctacttattatgctgattctgttaaaggtcgttttactatttctcgtgatgattctaaaaatactttatatttacaaatgaattctttacgtgctgaagatactgctgtttattattgtgttcgtcatggtaattttggtaattcttatgtttcttggtttgcttattggggtcaaggtactttagttactgtttcttct

SEQ ID NO: 876 - protein, 9 aa, synthetic construct
TGAVTTSNY

SEQ ID NO: 877 - skipped

SEQ ID NO: 878 - protein, 9 aa, synthetic construct
ALWYSNLWV

SEQ ID NO: 879 - protein, 110 aa, synthetic construct; identical to SEQ ID NO: 669

SEQ ID NO: 880 - DNA, 330 bp, synthetic construct; identical to SEQ ID NO: 670
  source 1..330: mol_type = other DNA

SEQ ID NO: 881 - protein, 8 aa, synthetic construct
GFTFNTYA

SEQ ID NO: 882 - protein, 10 aa, synthetic construct
IRSKHNNYET

SEQ ID NO: 883 - protein, 16 aa, synthetic construct
VRHGNFGNSYVSWFAY

SEQ ID NO: 884 - protein, 125 aa, synthetic construct
EVQLVESGGGLVQPGGSLRLSCAASGFTFNTYAMNWVRQAPGKGLEWVGRIRSKHNNYETYYADSVKGRFTISRDDSKNTLYLQMNSLRAEDTAVYYCVRHGNFGNSYVSWFAYWGQGTLVTVSS

SEQ ID NO: 885 - DNA, 375 bp, synthetic construct
  source 1..375: mol_type = other DNA
gaagttcaattagttgaatctggtggtggtttagttcaacctggtggttctttacgtttatcttgtgctgcttctggttttacttttaatacttatgctatgaattgggttcgtcaagctcctggtaaaggtttagaatgggttggtcgtattcgttctaaacataataattatgaaacttattatgctgattctgttaaaggtcgttttactatttctcgtgatgattctaaaaatactttatatttacaaatgaattctttacgtgctgaagatactgctgtttattattgtgttcgtcatggtaattttggtaattcttatgtttcttggtttgcttattggggtcaaggtactttagttactgtttcttct

SEQ ID NO: 886 - protein, 9 aa, synthetic construct
TGAVTTSNY

SEQ ID NO: 887 - skipped

SEQ ID NO: 888 - protein, 9 aa, synthetic construct
ALWYSNLWV

SEQ ID NO: 889 - protein, 110 aa, synthetic construct; identical to SEQ ID NO: 669

SEQ ID NO: 890 - DNA, 330 bp, synthetic construct; identical to SEQ ID NO: 670
  source 1..330: mol_type = other DNA

SEQ ID NO: 891 - protein, 8 aa, synthetic construct
GFTFNTYA

SEQ ID NO: 892 - protein, 10 aa, synthetic construct
IRSYINNYAT

SEQ ID NO: 893 - protein, 16 aa, synthetic construct
VRHGNFGNSYVSWFAY

SEQ ID NO: 894 - protein, 125 aa, synthetic construct
EVQLVESGGGLVQPGGSLRLSCAASGFTFNTYAMNWVRQAPGKGLEWVGRIRSYINNYATYYADSVKGRFTISRDDSKNTLYLQMNSLRAEDTAVYYCVRHGNFGNSYVSWFAYWGQGTLVTVSS

SEQ ID NO: 895 - DNA, 375 bp, synthetic construct
  source 1..375: mol_type = other DNA
gaagttcaattagttgaatctggtggtggtttagttcaacctggtggttctttacgtttatcttgtgctgcttctggttttacttttaatacttatgctatgaattgggttcgtcaagctcctggtaaaggtttagaatgggttggtcgtattcgttcttatattaataattatgctacttattatgctgattctgttaaaggtcgttttactatttctcgtgatgattctaaaaatactttatatttacaaatgaattctttacgtgctgaagatactgctgtttattattgtgttcgtcatggtaattttggtaattcttatgtttcttggtttgcttattggggtcaaggtactttagttactgtttcttct

SEQ ID NO: 896 - protein, 9 aa, synthetic construct
TGAVTTSNY

SEQ ID NO: 897 - skipped

SEQ ID NO: 898 - protein, 9 aa, synthetic construct
ALWYSNLWV

SEQ ID NO: 899 - protein, 110 aa, synthetic construct; identical to SEQ ID NO: 669

SEQ ID NO: 900 - DNA, 330 bp, synthetic construct; identical to SEQ ID NO: 670
  source 1..330: mol_type = other DNA

SEQ ID NO: 901 - protein, 8 aa, synthetic construct
GFTFNTYA

SEQ ID NO: 902 - protein, 10 aa, synthetic construct
IRSKVRNYAT

SEQ ID NO: 903 - protein, 16 aa, synthetic construct
VRHGNFGNSYVSWFAY

SEQ ID NO: 904 - protein, 125 aa, synthetic construct
EVQLVESGGGLVQPGGSLRLSCAASGFTFNTYAMNWVRQAPGKGLEWVGRIRSKVRNYATYYADSVKGRFTISRDDSKNTLYLQMNSLRAEDTAVYYCVRHGNFGNSYVSWFAYWGQGTLVTVSS

SEQ ID NO: 905 - DNA, 375 bp, synthetic construct
  source 1..375: mol_type = other DNA
gaagttcaattagttgaatctggtggtggtttagttcaacctggtggttctttacgtttatcttgtgctgcttctggttttacttttaatacttatgctatgaattgggttcgtcaagctcctggtaaaggtttagaatgggttggtcgtattcgttctaaagttcgtaattatgctacttattatgctgattctgttaaaggtcgttttactatttctcgtgatgattctaaaaatactttatatttacaaatgaattctttacgtgctgaagatactgctgtttattattgtgttcgtcatggtaattttggtaattcttatgtttcttggtttgcttattggggtcaaggtactttagttactgtttcttct

SEQ ID NO: 906 - protein, 9 aa, synthetic construct
TGAVTTSNY

SEQ ID NO: 907 - skipped

SEQ ID NO: 908 - protein, 9 aa, synthetic construct
ALWYSNLWV

SEQ ID NO: 909 - protein, 110 aa, synthetic construct; identical to SEQ ID NO: 669

SEQ ID NO: 910 - DNA, 330 bp, synthetic construct; identical to SEQ ID NO: 670
  source 1..330: mol_type = other DNA

SEQ ID NO: 911 - protein, 8 aa, synthetic construct
GFTFNTYA

SEQ ID NO: 912 - protein, 10 aa, synthetic construct
VRSKVNNYAT

SEQ ID NO: 913 - protein, 16 aa, synthetic construct
VRHGNFGNSYVSWFAY

SEQ ID NO: 914 - protein, 125 aa, synthetic construct
EVQLVESGGGLVQPGGSLRLSCAASGFTFNTYAMNWVRQAPGKGLEWVGRVRSKVNNYATYYADSVKGRFTISRDDSKNTLYLQMNSLRAEDTAVYYCVRHGNFGNSYVSWFAYWGQGTLVTVSS

SEQ ID NO: 915 - DNA, 375 bp, synthetic construct
  source 1..375: mol_type = other DNA
gaagttcaattagttgaatctggtggtggtttagttcaacctggtggttctttacgtttatcttgtgctgcttctggttttacttttaatacttatgctatgaattgggttcgtcaagctcctggtaaaggtttagaatgggttggtcgtgttcgttctaaagttaataattatgctacttattatgctgattctgttaaaggtcgttttactatttctcgtgatgattctaaaaatactttatatttacaaatgaattctttacgtgctgaagatactgctgtttattattgtgttcgtcatggtaattttggtaattcttatgtttcttggtttgcttattggggtcaaggtactttagttactgtttcttct

SEQ ID NO: 916 - protein, 9 aa, synthetic construct
TGAVTTSNY

SEQ ID NO: 917 - skipped

SEQ ID NO: 918 - protein, 9 aa, synthetic construct
ALWYSNLWV

SEQ ID NO: 919 - protein, 110 aa, synthetic construct; identical to SEQ ID NO: 669

SEQ ID NO: 920 - DNA, 330 bp, synthetic construct; identical to SEQ ID NO: 670
  source 1..330: mol_type = other DNA

SEQ ID NO: 921 - protein, 8 aa, synthetic construct
GFTFNTYA

SEQ ID NO: 922 - protein, 10 aa, synthetic construct
IRSKSGNYAT

SEQ ID NO: 923 - protein, 16 aa, synthetic construct
VRHGNFGNSYVSWFAY

SEQ ID NO: 924 - protein, 125 aa, synthetic construct
EVQLVESGGGLVQPGGSLRLSCAASGFTFNTYAMNWVRQAPGKGLEWVGRIRSKSGNYATYYADSVKGRFTISRDDSKNTLYLQMNSLRAEDTAVYYCVRHGNFGNSYVSWFAYWGQGTLVTVSS

SEQ ID NO: 925 - DNA, 375 bp, synthetic construct
  source 1..375: mol_type = other DNA
gaagttcaattagttgaatctggtggtggtttagttcaacctggtggttctttacgtttatcttgtgctgcttctggttttacttttaatacttatgctatgaattgggttcgtcaagctcctggtaaaggtttagaatgggttggtcgtattcgttctaaatctggtaattatgctacttattatgctgattctgttaaaggtcgttttactatttctcgtgatgattctaaaaatactttatatttacaaatgaattctttacgtgctgaagatactgctgtttattattgtgttcgtcatggtaattttggtaattcttatgtttcttggtttgcttattggggtcaaggtactttagttactgtttcttct

SEQ ID NO: 926 - protein, 9 aa, synthetic construct
TGAVTTSNY

SEQ ID NO: 927 - skipped

SEQ ID NO: 928 - protein, 9 aa, synthetic construct
ALWYSNLWV

SEQ ID NO: 929 - protein, 110 aa, synthetic construct; identical to SEQ ID NO: 669

SEQ ID NO: 930 - DNA, 330 bp, synthetic construct; identical to SEQ ID NO: 670
  source 1..330: mol_type = other DNA

SEQ ID NO: 931 - protein, 8 aa, synthetic construct
GFTFNTYA

SEQ ID NO: 932 - protein, 10 aa, synthetic construct
IRSKPNEYAT

SEQ ID NO: 933 - protein, 16 aa, synthetic construct
VRHGNFGNSYVSWFAY

SEQ ID NO: 934 - protein, 125 aa, synthetic construct
EVQLVESGGGLVQPGGSLRLSCAASGFTFNTYAMNWVRQAPGKGLEWVGRIRSKPNEYATYYADSVKGRFTISRDDSKNTLYLQMNSLRAEDTAVYYCVRHGNFGNSYVSWFAYWGQGTLVTVSS

SEQ ID NO: 935 - DNA, 375 bp, synthetic construct
  source 1..375: mol_type = other DNA
gaagttcaattagttgaatctggtggtggtttagttcaacctggtggttctttacgtttatcttgtgctgcttctggttttacttttaatacttatgctatgaattgggttcgtcaagctcctggtaaaggtttagaatgggttggtcgtattcgttctaaacctaatgaatatgctacttattatgctgattctgttaaaggtcgttttactatttctcgtgatgattctaaaaatactttatatttacaaatgaattctttacgtgctgaagatactgctgtttattattgtgttcgtcatggtaattttggtaattcttatgtttcttggtttgcttattggggtcaaggtactttagttactgtttcttct

SEQ ID NO: 936 - protein, 9 aa, synthetic construct
TGAVTTSNY

SEQ ID NO: 937 - skipped

SEQ ID NO: 938 - protein, 9 aa, synthetic construct
ALWYSNLWV

SEQ ID NO: 939 - protein, 110 aa, synthetic construct; identical to SEQ ID NO: 669

SEQ ID NO: 940 - DNA, 330 bp, synthetic construct; identical to SEQ ID NO: 670
  source 1..330: mol_type = other DNA

SEQ ID NO: 941 - protein, 8 aa, synthetic construct
GFTFNTYA

SEQ ID NO: 942 - protein, 10 aa, synthetic construct
IRSKFKNYAT

SEQ ID NO: 943 - protein, 16 aa, synthetic construct
VRHGNFGNSYVSWFAY

SEQ ID NO: 944 - protein, 125 aa, synthetic construct
EVQLVESGGGLVQPGGSLRLSCAASGFTFNTYAMNWVRQAPGKGLEWVGRIRSKFKNYATYYADSVKGRFTISRDDSKNTLYLQMNSLRAEDTAVYYCVRHGNFGNSYVSWFAYWGQGTLVTVSS

SEQ ID NO: 945 - DNA, 375 bp, synthetic construct
  source 1..375: mol_type = other DNA
gaagttcaattagttgaatctggtggtggtttagttcaacctggtggttctttacgtttatcttgtgctgcttctggttttacttttaatacttatgctatgaattgggttcgtcaagctcctggtaaaggtttagaatgggttggtcgtattcgttctaaatttaaaaattatgctacttattatgctgattctgttaaaggtcgttttactatttctcgtgatgattctaaaaatactttatatttacaaatgaattctttacgtgctgaagatactgctgtttattattgtgttcgtcatggtaattttggtaattcttatgtttcttggtttgcttattggggtcaaggtactttagttactgtttcttct

SEQ ID NO: 946 - protein, 9 aa, synthetic construct
TGAVTTSNY

SEQ ID NO: 947 - skipped

SEQ ID NO: 948 - protein, 9 aa, synthetic construct
ALWYSNLWV

SEQ ID NO: 949 - protein, 110 aa, synthetic construct; identical to SEQ ID NO: 669

SEQ ID NO: 950 - DNA, 330 bp, synthetic construct; identical to SEQ ID NO: 670
  source 1..330: mol_type = other DNA

SEQ ID NO: 951 - protein, 8 aa, synthetic construct
GFTFNTYA

SEQ ID NO: 952 - protein, 10 aa, synthetic construct
IRSKYTNYAT

SEQ ID NO: 953 - protein, 16 aa, synthetic construct
VRHGNFGNSYVSWFAY

SEQ ID NO: 954 - protein, 125 aa, synthetic construct
EVQLVESGGGLVQPGGSLRLSCAASGFTFNTYAMNWVRQAPGKGLEWVGRIRSKYTNYATYYADSVKGRFTISRDDSKNTLYLQMNSLRAEDTAVYYCVRHGNFGNSYVSWFAYWGQGTLVTVSS

SEQ ID NO: 955 - DNA, 375 bp, synthetic construct
  source 1..375: mol_type = other DNA
gaagttcaattagttgaatctggtggtggtttagttcaacctggtggttctttacgtttatcttgtgctgcttctggttttacttttaatacttatgctatgaattgggttcgtcaagctcctggtaaaggtttagaatgggttggtcgtattcgttctaaatatactaattatgctacttattatgctgattctgttaaaggtcgttttactatttctcgtgatgattctaaaaatactttatatttacaaatgaattctttacgtgctgaagatactgctgtttattattgtgttcgtcatggtaattttggtaattcttatgtttcttggtttgcttattggggtcaaggtactttagttactgtttcttct

SEQ ID NO: 956 - protein, 9 aa, synthetic construct
TGAVTTSNY

SEQ ID NO: 957 - skipped

SEQ ID NO: 958 - protein, 9 aa, synthetic construct
ALWYSNLWV

SEQ ID NO: 959 - protein, 110 aa, synthetic construct; identical to SEQ ID NO: 669

SEQ ID NO: 960 - DNA, 330 bp, synthetic construct; identical to SEQ ID NO: 670
  source 1..330: mol_type = other DNA

SEQ ID NO: 961 - protein, 8 aa, synthetic construct
GFTFNTYA

SEQ ID NO: 962 - protein, 10 aa, synthetic construct
IRSQYNNYAT

SEQ ID NO: 963 - protein, 16 aa, synthetic construct
VRHGNFGNSYVSWFAY

SEQ ID NO: 964 - protein, 125 aa, synthetic construct
EVQLVESGGGLVQPGGSLRLSCAASGFTFNTYAMNWVRQAPGKGLEWVGRIRSQYNNYATYYADSVKGRFTISRDDSKNTLYLQMNSLRAEDTAVYYCVRHGNFGNSYVSWFAYWGQGTLVTVSS

SEQ ID NO: 965 - DNA, 375 bp, synthetic construct
  source 1..375: mol_type = other DNA
gaagttcaattagttgaatctggtggtggtttagttcaacctggtggttctttacgtttatcttgtgctgcttctggttttacttttaatacttatgctatgaattgggttcgtcaagctcctggtaaaggtttagaatgggttggtcgtattcgttctcaatataataattatgctacttattatgctgattctgttaaaggtcgttttactatttctcgtgatgattctaaaaatactttatatttacaaatgaattctttacgtgctgaagatactgctgtttattattgtgttcgtcatggtaattttggtaattcttatgtttcttggtttgcttattggggtcaaggtactttagttactgtttcttct

SEQ ID NO: 966 - protein, 9 aa, synthetic construct
TGAVTTSNY

SEQ ID NO: 967 - skipped

SEQ ID NO: 968 - protein, 9 aa, synthetic construct
ALWYSNLWV

SEQ ID NO: 969 - protein, 110 aa, synthetic construct; identical to SEQ ID NO: 669

SEQ ID NO: 970 - DNA, 330 bp, synthetic construct; identical to SEQ ID NO: 670
  source 1..330: mol_type = other DNA

SEQ ID NO: 971 - protein, 8 aa, synthetic construct
GFTFNTYA

SEQ ID NO: 972 - protein, 10 aa, synthetic construct
IRSKYHNYAT

SEQ ID NO: 973 - protein, 16 aa, synthetic construct
VRHGNFGNSYVSWFAY

SEQ ID NO: 974 - protein, 125 aa, synthetic construct
EVQLVESGGGLVQPGGSLRLSCAASGFTFNTYAMNWVRQAPGKGLEWVGRIRSKYHNYATYYADSVKGRFTISRDDSKNTLYLQMNSLRAEDTAVYYCVRHGNFGNSYVSWFAYWGQGTLVTVSS

SEQ ID NO: 975 - DNA, 375 bp, synthetic construct
  source 1..375: mol_type = other DNA
gaagttcaattagttgaatctggtggtggtttagttcaacctggtggttctttacgtttatcttgtgctgcttctggttttacttttaatacttatgctatgaattgggttcgtcaagctcctggtaaaggtttagaatgggttggtcgtattcgttctaaatatcataattatgctacttattatgctgattctgttaaaggtcgttttactatttctcgtgatgattctaaaaatactttatatttacaaatgaattctttacgtgctgaagatactgctgtttattattgtgttcgtcatggtaattttggtaattcttatgtttcttggtttgcttattggggtcaaggtactttagttactgtttcttct

SEQ ID NO: 976 - protein, 9 aa, synthetic construct
TGAVTTSNY

SEQ ID NO: 977 - skipped

SEQ ID NO: 978 - protein, 9 aa, synthetic construct
ALWYSNLWV

SEQ ID NO: 979 - protein, 110 aa, synthetic construct; identical to SEQ ID NO: 669

SEQ ID NO: 980 - DNA, 330 bp, synthetic construct; identical to SEQ ID NO: 670
  source 1..330: mol_type = other DNA

SEQ ID NO: 981 - protein, 8 aa, synthetic construct
GFTFNTYA

SEQ ID NO: 982 - protein, 10 aa, synthetic construct
IRSKVNNYAT

SEQ ID NO: 983 - protein, 16 aa, synthetic construct
VRHGNFGNSYVSWFAY

SEQ ID NO: 984 - protein, 125 aa, synthetic construct
EVQLVESGGGLVQPGGSLRLSCAASGFTFNTYAMNWVRQAPGKGLEWVGRIRSKVNNYATYYADSVKGRFTISRDDSKNTLYLQMNSLRAEDTAVYYCVRHGNFGNSYVSWFAYWGQGTLVTVSS

SEQ ID NO: 985 - DNA, 375 bp, synthetic construct
  source 1..375: mol_type = other DNA
gaagttcaattagttgaatctggtggtggtttagttcaacctggtggttctttacgtttatcttgtgctgcttctggttttacttttaatacttatgctatgaattgggttcgtcaagctcctggtaaaggtttagaatgggttggtcgtattcgttctaaagttaataattatgctacttattatgctgattctgttaaaggtcgttttactatttctcgtgatgattctaaaaatactttatatttacaaatgaattctttacgtgctgaagatactgctgtttattattgtgttcgtcatggtaattttggtaattcttatgtttcttggtttgcttattggggtcaaggtactttagttactgtttcttct

SEQ ID NO: 986 - protein, 9 aa, synthetic construct
TGAVTTSNY

SEQ ID NO: 987 - skipped

SEQ ID NO: 988 - protein, 9 aa, synthetic construct
ALWYSNLWV

SEQ ID NO: 989 - protein, 110 aa, synthetic construct; identical to SEQ ID NO: 669

SEQ ID NO: 990 - DNA, 330 bp, synthetic construct; identical to SEQ ID NO: 670
  source 1..330: mol_type = other DNA

SEQ ID NO: 991 - protein, 8 aa, synthetic construct
GFTFNTYA

SEQ ID NO: 992 - protein, 10 aa, synthetic construct
IRSSNNNYAT

SEQ ID NO: 993 - protein, 16 aa, synthetic construct
VRHGNFGNSYVSWFAY

SEQ ID NO: 994 - protein, 125 aa, synthetic construct
EVQLVESGGGLVQPGGSLRLSCAASGFTFNTYAMNWVRQAPGKGLEWVGRIRSSNNNYATYYADSVKGRFTISRDDSKNTLYLQMNSLRAEDTAVYYCVRHGNFGNSYVSWFAYWGQGTLVTVSS

SEQ ID NO: 995 - DNA, 375 bp, synthetic construct
  source 1..375: mol_type = other DNA
gaagttcaattagttgaatctggtggtggtttagttcaacctggtggttctttacgtttatcttgtgctgcttctggttttacttttaatacttatgctatgaattgggttcgtcaagctcctggtaaaggtttagaatgggttggtcgtattcgttcttctaataataattatgctacttattatgctgattctgttaaaggtcgttttactatttctcgtgatgattctaaaaatactttatatttacaaatgaattctttacgtgctgaagatactgctgtttattattgtgttcgtcatggtaattttggtaattcttatgtttcttggtttgcttattggggtcaaggtactttagttactgtttcttct

SEQ ID NO: 996 - protein, 9 aa, synthetic construct
TGAVTTSNY

SEQ ID NO: 997 - skipped

SEQ ID NO: 998 - protein, 9 aa, synthetic construct
ALWYSNLWV

SEQ ID NO: 999 - protein, 110 aa, synthetic construct; identical to SEQ ID NO: 669

SEQ ID NO: 1000 - DNA, 330 bp, synthetic construct; identical to SEQ ID NO: 670
  source 1..330: mol_type = other DNA

SEQ ID NO: 1001 - protein, 8 aa, synthetic construct
GFTFNTYA

SEQ ID NO: 1002 - protein, 10 aa, synthetic construct
IRSKYNKYAT

SEQ ID NO: 1003 - protein, 16 aa, synthetic construct
VRHGNFGNSYVSWFAY

SEQ ID NO: 1004 - protein, 125 aa, synthetic construct
EVQLVESGGGLVQPGGSLRLSCAASGFTFNTYAMNWVRQAPGKGLEWVGRIRSKYNKYATYYADSVKGRFTISRDDSKNTLYLQMNSLRAEDTAVYYCVRHGNFGNSYVSWFAYWGQGTLVTVSS

SEQ ID NO: 1005 - DNA, 375 bp, synthetic construct
  source 1..375: mol_type = other DNA
gaagttcaattagttgaatctggtggtggtttagttcaacctggtggttctttacgtttatcttgtgctgcttctggttttacttttaatacttatgctatgaattgggttcgtcaagctcctggtaaaggtttagaatgggttggtcgtattcgttctaaatataataaatatgctacttattatgctgattctgttaaaggtcgttttactatttctcgtgatgattctaaaaatactttatatttacaaatgaattctttacgtgctgaagatactgctgtttattattgtgttcgtcatggtaattttggtaattcttatgtttcttggtttgcttattggggtcaaggtactttagttactgtttcttct

SEQ ID NO: 1006 - protein, 9 aa, synthetic construct
TGAVTTSNY

SEQ ID NO: 1007 - skipped

SEQ ID NO: 1008 - protein, 9 aa, synthetic construct
ALWYSNLWV

SEQ ID NO: 1009 - protein, 110 aa, synthetic construct; identical to SEQ ID NO: 669

SEQ ID NO: 1010 - DNA, 330 bp, synthetic construct; identical to SEQ ID NO: 670
  source 1..330: mol_type = other DNA

SEQ ID NO: 1011 - protein, 8 aa, synthetic construct
GFTFNTYA

SEQ ID NO: 1012 - protein, 10 aa, synthetic construct
VRSKASNYAT

SEQ ID NO: 1013 - protein, 16 aa, synthetic construct
VRHGNFGNSYVSWFAY

SEQ ID NO: 1014 - protein, 125 aa, synthetic construct
EVQLVESGGGLVQPGGSLRLSCAASGFTFNTYAMNWVRQAPGKGLEWVGRVRSKASNYATYYADSVKGRFTISRDDSKNTLYLQMNSLRAEDTAVYYCVRHGNFGNSYVSWFAYWGQGTLVTVSS

SEQ ID NO: 1015 - DNA, 375 bp, synthetic construct
  source 1..375: mol_type = other DNA
gaagttcaattagttgaatctggtggtggtttagttcaacctggtggttctttacgtttatcttgtgctgcttctggttttacttttaatacttatgctatgaattgggttcgtcaagctcctggtaaaggtttagaatgggttggtcgtgttcgttctaaagcttctaattatgctacttattatgctgattctgttaaaggtcgttttactatttctcgtgatgattctaaaaatactttatatttacaaatgaattctttacgtgctgaagatactgctgtttattattgtgttcgtcatggtaattttggtaattcttatgtttcttggtttgcttattggggtcaaggtactttagttactgtttcttct

SEQ ID NO: 1016 - protein, 9 aa, synthetic construct
TGAVTTSNY

SEQ ID NO: 1017 - skipped

SEQ ID NO: 1018 - protein, 9 aa, synthetic construct
ALWYSNLWV

SEQ ID NO: 1019 - protein, 110 aa, synthetic construct; identical to SEQ ID NO: 669

SEQ ID NO: 1020 - DNA, 330 bp, synthetic construct; identical to SEQ ID NO: 670
  source 1..330: mol_type = other DNA

SEQ ID NO: 1021 - protein, 8 aa, synthetic construct
GFTFNTYA

SEQ ID NO: 1022 - protein, 10 aa, synthetic construct
IRSKSRNYAT

SEQ ID NO: 1023 - protein, 16 aa, synthetic construct
VRHGNFGNSYVSWFAY

SEQ ID NO: 1024 - protein, 125 aa, synthetic construct
EVQLVESGGGLVQPGGSLRLSCAASGFTFNTYAMNWVRQAPGKGLEWVGRIRSKSRNYATYYADSVKGRFTISRDDSKNTLYLQMNSLRAEDTAVYYCVRHGNFGNSYVSWFAYWGQGTLVTVSS

SEQ ID NO: 1025 - DNA, 375 bp, synthetic construct
  source 1..375: mol_type = other DNA
gaagttcaattagttgaatctggtggtggtttagttcaacctggtggttctttacgtttatcttgtgctgcttctggttttacttttaatacttatgctatgaattgggttcgtcaagctcctggtaaaggtttagaatgggttggtcgtattcgttctaaatctcgtaattatgctacttattatgctgattctgttaaaggtcgttttactatttctcgtgatgattctaaaaatactttatatttacaaatgaattctttacgtgctgaagatactgctgtttattattgtgttcgtcatggtaattttggtaattcttatgtttcttggtttgcttattggggtcaaggtactttagttactgtttcttct

SEQ ID NO: 1026 - protein, 9 aa, synthetic construct
TGAVTTSNY

SEQ ID NO: 1027 - skipped

SEQ ID NO: 1028 - protein, 9 aa, synthetic construct
ALWYSNLWV

SEQ ID NO: 1029 - protein, 110 aa, synthetic construct; identical to SEQ ID NO: 669

SEQ ID NO: 1030 - DNA, 330 bp, synthetic construct; identical to SEQ ID NO: 670
  source 1..330: mol_type = other DNA

SEQ ID NO: 1031 - protein, 8 aa, synthetic construct
GFTFNTYA

SEQ ID NO: 1032 - protein, 10 aa, synthetic construct
IRSKYNNYAT

SEQ ID NO: 1033 - protein, 16 aa, synthetic construct
VREGGSGNYYNVYFAY

SEQ ID NO: 1034 - protein, 125 aa, synthetic construct
EVQLVESGGGLVQPGGSLRLSCAASGFTFNTYAMNWVRQAPGKGLEWVGRIRSKYNNYATYYADSVKGRFTISRDDSKNTLYLQMNSLRAEDTAVYYCVREGGSGNYYNVYFAYWGQGTLVTVSS

SEQ ID NO: 1035 - DNA, 375 bp, synthetic construct
  source 1..375: mol_type = other DNA
gaagttcaattagttgaatctggtggtggtttagttcaacctggtggttctttacgtttatcttgtgctgcttctggttttacttttaatacttatgctatgaattgggttcgtcaagctcctggtaaaggtttagaatgggttggtcgtattcgttctaaatataataattatgctacttattatgctgattctgttaaaggtcgttttactatttctcgtgatgattctaaaaatactttatatttacaaatgaattctttacgtgctgaagatactgctgtttattattgtgttcgtgaaggtggttctggtaattattataatgtttattttgcttattggggtcaaggtactttagttactgtttcttct

SEQ ID NO: 1036 - protein, 9 aa, synthetic construct
TGAVTTSNY

SEQ ID NO: 1037 - skipped

SEQ ID NO: 1038 - protein, 9 aa, synthetic construct
ALWYSNLWV

SEQ ID NO: 1039 - protein, 110 aa, synthetic construct; identical to SEQ ID NO: 669

SEQ ID NO: 1040 - DNA, 330 bp, synthetic construct; identical to SEQ ID NO: 670
  source 1..330: mol_type = other DNA

SEQ ID NO: 1041 - protein, 8 aa, synthetic construct
GFTFNTYA

SEQ ID NO: 1042 - protein, 10 aa, synthetic construct
IRSKYNNYAT

SEQ ID NO: 1043 - protein, 16 aa, synthetic construct
VRSGRFGESHVGPFAY

SEQ ID NO: 1044 - protein, 125 aa, synthetic construct
EVQLVESGGGLVQPGGSLRLSCAASGFTFNTYAMNWVRQAPGKGLEWVGRIRSKYNNYATYYADSVKGRFTISRDDSKNTLYLQMNSLRAEDTAVYYCVRSGRFGESHVGPFAYWGQGTLVTVSS

SEQ ID NO: 1045 - DNA, 375 bp, synthetic construct
  source 1..375: mol_type = other DNA
gaagttcaattagttgaatctggtggtggtttagttcaacctggtggttctttacgtttatcttgtgctgcttctggttttacttttaatacttatgctatgaattgggttcgtcaagctcctggtaaaggtttagaatgggttggtcgtattcgttctaaatataataattatgctacttattatgctgattctgttaaaggtcgttttactatttctcgtgatgattctaaaaatactttatatttacaaatgaattctttacgtgctgaagatactgctgtttattattgtgttcgttctggtcgttttggtgaatctcatgttggtccttttgcttattggggtcaaggtactttagttactgtttcttct

SEQ ID NO: 1046 - protein, 9 aa, synthetic construct
TGAVTTSNY

SEQ ID NO: 1047 - skipped

SEQ ID NO: 1048 - protein, 9 aa, synthetic construct
ALWYSNLWV

SEQ ID NO: 1049 - protein, 110 aa, synthetic construct; identical to SEQ ID NO: 669

SEQ ID NO: 1050 - DNA, 330 bp, synthetic construct; identical to SEQ ID NO: 670
  source 1..330: mol_type = other DNA

SEQ ID NO: 1051 - protein, 8 aa, synthetic construct
GFTFNTYA

SEQ ID NO: 1052 - protein, 10 aa, synthetic construct
IRSKYNNYAT

SEQ ID NO: 1053 - protein, 16 aa, synthetic construct
ARHGEYSSGWPYYFAY

SEQ ID NO: 1054 - protein, 125 aa, synthetic construct
EVQLVESGGGLVQPGGSLRLSCAASGFTFNTYAMNWVRQAPGKGLEWVGRIRSKYNNYATYYADSVKGRFTISRDDSKNTLYLQMNSLRAEDTAVYYCARHGEYSSGWPYYFAYWGQGTLVTVSS

SEQ ID NO: 1055 - DNA, 375 bp, synthetic construct
  source 1..375: mol_type = other DNA
gaagttcaattagttgaatctggtggtggtttagttcaacctggtggttctttacgtttatcttgtgctgcttctggttttacttttaatacttatgctatgaattgggttcgtcaagctcctggtaaaggtttagaatgggttggtcgtattcgttctaaatataataattatgctacttattatgctgattctgttaaaggtcgttttactatttctcgtgatgattctaaaaatactttatatttacaaatgaattctttacgtgctgaagatactgctgtttattattgtgctcgtcatggtgaatattcttctggttggccttattattttgcttattggggtcaaggtactttagttactgtttcttct

SEQ ID NO: 1056 - protein, 9 aa, synthetic construct
TGAVTTSNY

SEQ ID NO: 1057 - skipped

SEQ ID NO: 1058 - protein, 9 aa, synthetic construct
ALWYSNLWV

SEQ ID NO: 1059 - protein, 110 aa, synthetic construct; identical to SEQ ID NO: 669

SEQ ID NO: 1060 - DNA, 330 bp, synthetic construct; identical to SEQ ID NO: 670
  source 1..330: mol_type = other DNA

SEQ ID NO: 1061 - protein, 8 aa, synthetic construct
GFTFNTYA

SEQ ID NO: 1062 - protein, 10 aa, synthetic construct
IRSKYNNYAT

SEQ ID NO: 1063 - protein, 16 aa, synthetic construct
VRHGNFGNVGTSYFAY

SEQ ID NO: 1064 - protein, 125 aa, synthetic construct
EVQLVESGGGLVQPGGSLRLSCAASGFTFNTYAMNWVRQAPGKGLEWVGRIRSKYNNYATYYADSVKGRFTISRDDSKNTLYLQMNSLRAEDTAVYYCVRHGNFGNVGTSYFAYWGQGTLVTVSS

SEQ ID NO: 1065 - DNA, 375 bp, synthetic construct
  source 1..375: mol_type = other DNA
gaagttcaattagttgaatctggtggtggtttagttcaacctggtggttctttacgtttatcttgtgctgcttctggttttacttttaatacttatgctatgaattgggttcgtcaagctcctggtaaaggtttagaatgggttggtcgtattcgttctaaatataataattatgctacttattatgctgattctgttaaaggtcgttttactatttctcgtgatgattctaaaaatactttatatttacaaatgaattctttacgtgctgaagatactgctgtttattattgtgttcgtcatggtaattttggtaatgttggtacttcttattttgcttattggggtcaaggtactttagttactgtttcttct

SEQ ID NO: 1066 - protein, 9 aa, synthetic construct
TGAVTTSNY

SEQ ID NO: 1067 - skipped

SEQ ID NO: 1068 - protein, 9 aa, synthetic construct
ALWYSNLWV

SEQ ID NO: 1069 - protein, 110 aa, synthetic construct; identical to SEQ ID NO: 669

SEQ ID NO: 1070 - DNA, 330 bp, synthetic construct; identical to SEQ ID NO: 670
  source 1..330: mol_type = other DNA

SEQ ID NO: 1071 - protein, 8 aa, synthetic construct
GFTFNTYA

SEQ ID NO: 1072 - protein, 10 aa, synthetic construct
IRSKYNNYAT

SEQ ID NO: 1073 - protein, 16 aa, synthetic construct
VREGIGGTSYRGNFAY

SEQ ID NO: 1074 - protein, 125 aa, synthetic construct
EVQLVESGGGLVQPGGSLRLSCAASGFTFNTYAMNWVRQAPGKGLEWVGRIRSKYNNYATYYADSVKGRFTISRDDSKNTLYLQMNSLRAEDTAVYYCVREGIGGTSYRGNFAYWGQGTLVTVSS

SEQ ID NO: 1075 - DNA, 375 bp, synthetic construct
  source 1..375: mol_type = other DNA
gaagttcaattagttgaatctggtggtggtttagttcaacctggtggttctttacgtttatcttgtgctgcttctggttttacttttaatacttatgctatgaattgggttcgtcaagctcctggtaaaggtttagaatgggttggtcgtattcgttctaaatataataattatgctacttattatgctgattctgttaaaggtcgttttactatttctcgtgatgattctaaaaatactttatatttacaaatgaattctttacgtgctgaagatactgctgtttattattgtgttcgtgaaggtattggtggtacttcttatcgtggtaattttgcttattggggtcaaggtactttagttactgtttcttct

SEQ ID NO: 1076 - protein, 9 aa, synthetic construct
TGAVTTSNY

SEQ ID NO: 1077 - skipped

SEQ ID NO: 1078 - protein, 9 aa, synthetic construct
ALWYSNLWV

SEQ ID NO: 1079 - protein, 110 aa, synthetic construct; identical to SEQ ID NO: 669

SEQ ID NO: 1080 - DNA, 330 bp, synthetic construct; identical to SEQ ID NO: 670
  source 1..330: mol_type = other DNA

SEQ ID NO: 1081 - protein, 8 aa, synthetic construct
GFTFNTYA

SEQ ID NO: 1082 - protein, 10 aa, synthetic construct
IRSKYNNYAT

SEQ ID NO: 1083 - protein, 16 aa, synthetic construct
VRHGNFGNSYVSWFAY

SEQ ID NO: 1084 - protein, 125 aa, synthetic construct
EVQLVESGGGLVQPGGSLRLSCAASGFTFNTYAMNWVRQAPGKGLEWVGRIRSKYNNYATYYADSVKGRFTISRDDSKNTLYLQMNSLRAEDTAVYYCVRHGNFGNSYVSWFAYWGQGTLVTVSS

SEQ ID NO: 1085 - DNA, 375 bp, synthetic construct
  source 1..375: mol_type = other DNA
gaagttcaattagttgaatctggtggtggtttagttcaacctggtggttctttacgtttatcttgtgctgcttctggttttacttttaatacttatgctatgaattgggttcgtcaagctcctggtaaaggtttagaatgggttggtcgtattcgttctaaatataataattatgctacttattatgctgattctgttaaaggtcgttttactatttctcgtgatgattctaaaaatactttatatttacaaatgaattctttacgtgctgaagatactgctgtttattattgtgttcgtcatggtaattttggtaattcttatgtttcttggtttgcttattggggtcaaggtactttagttactgtttcttct

SEQ ID NO: 1086 - protein, 9 aa, synthetic construct
TGAVTTRNY

SEQ ID NO: 1087 - skipped

SEQ ID NO: 1088 - protein, 9 aa, synthetic construct
ALWYSNLWV

SEQ ID NO: 1089 - protein, 110 aa, synthetic construct
DIQMTQSPSSLSASVGDRVTITCRSSTGAVTTRNYANWVQQKPGKAPKGLIGGTNKRAPGVPARFSGSGSGTDFTLTISSLQPEDFATYYCALWYSNLWVFGQGTKVEIK

SEQ ID NO: 1090 - DNA, 330 bp, synthetic construct
  source 1..330: mol_type = other DNA
gatattcaaatgactcaatctccttcttctttatctgcttctgttggtgatcgtgttactattacttgtcgttcttctactggtgctgttactactcgtaattatgctaattgggttcaacaaaaacctggtaaagctcctaaaggtttaattggtggtactaataaacgtgctcctggtgttcctgctcgtttttctggttctggttctggtactgattttactttaactatttcttctttacaacctgaagattttgctacttattattgtgctttatggtattctaatttatgggtttttggtcaaggtactaaagttgaaattaaa

SEQ ID NO: 1091 - protein, 8 aa, synthetic construct
GFTFNTYA

SEQ ID NO: 1092 - protein, 10 aa, synthetic construct
IRSKYNNYAT

SEQ ID NO: 1093 - protein, 16 aa, synthetic construct
VRHGNFGNSYVSWFAY

SEQ ID NO: 1094 - protein, 125 aa, synthetic construct; identical to SEQ ID NO: 1084

SEQ ID NO: 1095 - DNA, 375 bp, synthetic construct; identical to SEQ ID NO: 1085
  source 1..375: mol_type = other DNA

SEQ ID NO: 1096 - protein, 9 aa, synthetic construct
TGAVTTSTY

SEQ ID NO: 1097 - skipped

SEQ ID NO: 1098 - protein, 9 aa, synthetic construct
ALWYSNLWV

SEQ ID NO: 1099 - protein, 110 aa, synthetic construct
DIQMTQSPSSLSASVGDRVTITCRSSTGAVTTSTYANWVQQKPGKAPKGLIGGTNKRAPGVPARFSGSGSGTDFTLTISSLQPEDFATYYCALWYSNLWVFGQGTKVEIK

SEQ ID NO: 1100 - DNA, 330 bp, synthetic construct
  source 1..330: mol_type = other DNA
gatattcaaatgactcaatctccttcttctttatctgcttctgttggtgatcgtgttactattacttgtcgttcttctactggtgctgttactacttctacttatgctaattgggttcaacaaaaacctggtaaagctcctaaaggtttaattggtggtactaataaacgtgctcctggtgttcctgctcgtttttctggttctggttctggtactgattttactttaactatttcttctttacaacctgaagattttgctacttattattgtgctttatggtattctaatttatgggtttttggtcaaggtactaaagttgaaattaaa

SEQ ID NO: 1101 - protein, 8 aa, synthetic construct
GFTFNTYA

SEQ ID NO: 1102 - protein, 10 aa, synthetic construct
IRSKYNNYAT

SEQ ID NO: 1103 - protein, 16 aa, synthetic construct
VRHGNFGNSYVSWFAY

SEQ ID NO: 1104 - protein, 125 aa, synthetic construct; identical to SEQ ID NO: 1084

SEQ ID NO: 1105 - DNA, 375 bp, synthetic construct; identical to SEQ ID NO: 1085
  source 1..375: mol_type = other DNA

SEQ ID NO: 1106 - protein, 9 aa, synthetic construct
TGAVSTNYY

SEQ ID NO: 1107 - skipped

SEQ ID NO: 1108 - protein, 9 aa, synthetic construct
ALWYSNLWV

SEQ ID NO: 1109 - protein, 110 aa, synthetic construct
DIQMTQSPSSLSASVGDRVTITCRSSTGAVSTNYYANWVQQKPGKAPKGLIGGTNKRAPGVPARFSGSGSGTDFTLTISSLQPEDFATYYCALWYSNLWVFGQGTKVEIK

SEQ ID NO: 1110 - DNA, 330 bp, synthetic construct
  source 1..330: mol_type = other DNA
gatattcaaatgactcaatctccttcttctttatctgcttctgttggtgatcgtgttactattacttgtcgttcttctactggtgctgtttctactaattattatgctaattgggttcaacaaaaacctggtaaagctcctaaaggtttaattggtggtactaataaacgtgctcctggtgttcctgctcgtttttctggttctggttctggtactgattttactttaactatttcttctttacaacctgaagattttgctacttattattgtgctttatggtattctaatttatgggtttttggtcaaggtactaaagttgaaattaaa

SEQ ID NO: 1111 - protein, 8 aa, synthetic construct
GFTFNTYA

SEQ ID NO: 1112 - protein, 10 aa, synthetic construct
IRSKYNNYAT

SEQ ID NO: 1113 - protein, 16 aa, synthetic construct
VRHGNFGNSYVSWFAY

SEQ ID NO: 1114 - protein, 125 aa, synthetic construct; identical to SEQ ID NO: 1084

SEQ ID NO: 1115 - DNA, 375 bp, synthetic construct; identical to SEQ ID NO: 1085
  source 1..375: mol_type = other DNA

SEQ ID NO: 1116 - protein, 9 aa, synthetic construct
TGAVPTSNY

SEQ ID NO: 1117 - skipped

SEQ ID NO: 1118 - protein, 9 aa, synthetic construct
ALWYSNLWV

SEQ ID NO: 1119 - protein, 110 aa, synthetic construct
DIQMTQSPSSLSASVGDRVTITCRSSTGAVPTSNYANWVQQKPGKAPKGLIGGTNKRAPGVPARFSGSGSGTDFTLTISSLQPEDFATYYCALWYSNLWVFGQGTKVEIK

SEQ ID NO: 1120 - DNA, 330 bp, synthetic construct
  source 1..330: mol_type = other DNA
gatattcaaatgactcaatctccttcttctttatctgcttctgttggtgatcgtgttactattacttgtcgttcttctactggtgctgttcctacttctaattatgctaattgggttcaacaaaaacctggtaaagctcctaaaggtttaattggtggtactaataaacgtgctcctggtgttcctgctcgtttttctggttctggttctggtactgattttactttaactatttcttctttacaacctgaagattttgctacttattattgtgctttatggtattctaatttatgggtttttggtcaaggtactaaagttgaaattaaa

SEQ ID NO: 1121 - protein, 8 aa, synthetic construct
GFTFNTYA

SEQ ID NO: 1122 - protein, 10 aa, synthetic construct
IRSKYNNYAT

SEQ ID NO: 1123 - protein, 16 aa, synthetic construct
VRHGNFGNSYVSWFAY

SEQ ID NO: 1124 - protein, 125 aa, synthetic construct; identical to SEQ ID NO: 1084

SEQ ID NO: 1125 - DNA, 375 bp, synthetic construct; identical to SEQ ID NO: 1085
  source 1..375: mol_type = other DNA

SEQ ID NO: 1126 - protein, 9 aa, synthetic construct
TGAVPTSLY

SEQ ID NO: 1127 - skipped

SEQ ID NO: 1128 - protein, 9 aa, synthetic construct
ALWYSNLWV

SEQ ID NO: 1129 - protein, 110 aa, synthetic construct
DIQMTQSPSSLSASVGDRVTITCRSSTGAVPTSLYANWVQQKPGKAPKGLIGGTNKRAPGVPARFSGSGSGTDFTLTISSLQPEDFATYYCALWYSNLWVFGQGTKVEIK

SEQ ID NO: 1130 - DNA, 330 bp, synthetic construct
  source 1..330: mol_type = other DNA
gatattcaaatgactcaatctccttcttctttatctgcttctgttggtgatcgtgttactattacttgtcgttcttctactggtgctgttcctacttctttatatgctaattgggttcaacaaaaacctggtaaagctcctaaaggtttaattggtggtactaataaacgtgctcctggtgttcctgctcgtttttctggttctggttctggtactgattttactttaactatttcttctttacaacctgaagattttgctacttattattgtgctttatggtattctaatttatgggtttttggtcaaggtactaaagttgaaattaaa

SEQ ID NO: 1131 - protein, 8 aa, synthetic construct
GFTFNTYA

SEQ ID NO: 1132 - protein, 10 aa, synthetic construct
IRSKYNNYAT

SEQ ID NO: 1133 - protein, 16 aa, synthetic construct
VRHGNFGNSYVSWFAY

SEQ ID NO: 1134 - protein, 125 aa, synthetic construct; identical to SEQ ID NO: 1084

SEQ ID NO: 1135 - DNA, 375 bp, synthetic construct; identical to SEQ ID NO: 1085
  source 1..375: mol_type = other DNA

SEQ ID NO: 1136 - protein, 9 aa, synthetic construct
TGAVTPSNY

SEQ ID NO: 1137 - skipped

SEQ ID NO: 1138 - protein, 9 aa, synthetic construct
ALWYSNLWV

SEQ ID NO: 1139 - protein, 110 aa, synthetic construct
DIQMTQSPSSLSASVGDRVTITCRSSTGAVTPSNYANWVQQKPGKAPKGLIGGTNKRAPGVPARFSGSGSGTDFTLTISSLQPEDFATYYCALWYSNLWVFGQGTKVEIK

SEQ ID NO: 1140 - DNA, 330 bp, synthetic construct
  source 1..330: mol_type = other DNA
gatattcaaatgactcaatctccttcttctttatctgcttctgttggtgatcgtgttactattacttgtcgttcttctactggtgctgttactccttctaattatgctaattgggttcaacaaaaacctggtaaagctcctaaaggtttaattggtggtactaataaacgtgctcctggtgttcctgctcgtttttctggttctggttctggtactgattttactttaactatttcttctttacaacctgaagattttgctacttattattgtgctttatggtattctaatttatgggtttttggtcaaggtactaaagttgaaattaaa

SEQ ID NO: 1141 - protein, 8 aa, synthetic construct
GFTFNTYA

SEQ ID NO: 1142 - protein, 10 aa, synthetic construct
IRSKYNNYAT

SEQ ID NO: 1143 - protein, 16 aa, synthetic construct
VRHGNFGNSYVSWFAY

SEQ ID NO: 1144 - protein, 125 aa, synthetic construct; identical to SEQ ID NO: 1084

SEQ ID NO: 1145 - DNA, 375 bp, synthetic construct; identical to SEQ ID NO: 1085
  source 1..375: mol_type = other DNA

SEQ ID NO: 1146 - protein, 9 aa, synthetic construct
GGSVTTHNY

SEQ ID NO: 1147 - skipped

SEQ ID NO: 1148 - protein, 9 aa, synthetic construct
ALWYSNLWV

SEQ ID NO: 1149 - protein, 110 aa, synthetic construct
DIQMTQSPSSLSASVGDRVTITCRSSGGSVTTHNYANWVQQKPGKAPKGLIGGTNKRAPGVPARFSGSGSGTDFTLTISSLQPEDFATYYCALWYSNLWVFGQGTKVEIK

SEQ ID NO: 1150 - DNA, 330 bp, synthetic construct
  source 1..330: mol_type = other DNA
gatattcaaatgactcaatctccttcttctttatctgcttctgttggtgatcgtgttactattacttgtcgttcttctggtggttctgttactactcataattatgctaattgggttcaacaaaaacctggtaaagctcctaaaggtttaattggtggtactaataaacgtgctcctggtgttcctgctcgtttttctggttctggttctggtactgattttactttaactatttcttctttacaacctgaagattttgctacttattattgtgctttatggtattctaatttatgggtttttggtcaaggtactaaagttgaaattaaa

SEQ ID NO: 1151 - protein, 8 aa, synthetic construct
GFTFNTYA

SEQ ID NO: 1152 - protein, 10 aa, synthetic construct
IRSKYNNYAT

SEQ ID NO: 1153 - protein, 16 aa, synthetic construct
VRHGNFGNSYVSWFAY

SEQ ID NO: 1154 - protein, 125 aa, synthetic construct; identical to SEQ ID NO: 1084

SEQ ID NO: 1155 - DNA, 375 bp, synthetic construct; identical to SEQ ID NO: 1085
  source 1..375: mol_type = other DNA

SEQ ID NO: 1156 - protein, 9 aa, synthetic construct
TGAVTSPSY

SEQ ID NO: 1157 - skipped

SEQ ID NO: 1158 - protein, 9 aa, synthetic construct
ALWYSNLWV

SEQ ID NO: 1159 - protein, 110 aa, synthetic construct
DIQMTQSPSSLSASVGDRVTITCRSSTGAVTSPSYANWVQQKPGKAPKGLIGGTNKRAPGVPARFSGSGSGTDFTLTISSLQPEDFATYYCALWYSNLWVFGQGTKVEIK

SEQ ID NO: 1160 - DNA, 330 bp, synthetic construct
  source 1..330: mol_type = other DNA
gatattcaaatgactcaatctccttcttctttatctgcttctgttggtgatcgtgttactattacttgtcgttcttctactggtgctgttacttctccttcttatgctaattgggttcaacaaaaacctggtaaagctcctaaaggtttaattggtggtactaataaacgtgctcctggtgttcctgctcgtttttctggttctggttctggtactgattttactttaactatttcttctttacaacctgaagattttgctacttattattgtgctttatggtattctaatttatgggtttttggtcaaggtactaaagttgaaattaaa

SEQ ID NO: 1161 - protein, 8 aa, synthetic construct
GFTFNTYA

SEQ ID NO: 1162 - protein, 10 aa, synthetic construct
IRSKYNNYAT

SEQ ID NO: 1163 - protein, 16 aa, synthetic construct
VRHGNFGNSYVSWFAY

SEQ ID NO: 1164 - protein, 125 aa, synthetic construct; identical to SEQ ID NO: 1084

SEQ ID NO: 1165 - DNA, 375 bp, synthetic construct; identical to SEQ ID NO: 1085
  source 1..375: mol_type = other DNA

SEQ ID NO: 1166 - protein, 9 aa, synthetic construct
LGSVTTFNY

SEQ ID NO: 1167 - skipped

SEQ ID NO: 1168 - protein, 9 aa, synthetic construct
ALWYSNLWV

SEQ ID NO: 1169 - protein, 110 aa, synthetic construct
DIQMTQSPSSLSASVGDRVTITCRSSLGSVTTFNYANWVQQKPGKAPKGLIGGTNKRAPGVPARFSGSGSGTDFTLTISSLQPEDFATYYCALWYSNLWVFGQGTKVEIK

SEQ ID NO: 1170 - DNA, 330 bp, synthetic construct
  source 1..330: mol_type = other DNA
gatattcaaatgactcaatctccttcttctttatctgcttctgttggtgatcgtgttactattacttgtcgttcttctttaggttctgttactacttttaattatgctaattgggttcaacaaaaacctggtaaagctcctaaaggtttaattggtggtactaataaacgtgctcctggtgttcctgctcgtttttctggttctggttctggtactgattttactttaactatttcttctttacaacctgaagattttgctacttattattgtgctttatggtattctaatttatgggtttttggtcaaggtactaaagttgaaattaaa

SEQ ID NO: 1171 - protein, 8 aa, synthetic construct
GFTFNTYA

SEQ ID NO: 1172 - protein, 10 aa, synthetic construct
IRSKYNNYAT

SEQ ID NO: 1173 - protein, 16 aa, synthetic construct
VRHGNFGNSYVSWFAY

SEQ ID NO: 1174 - protein, 125 aa, synthetic construct; identical to SEQ ID NO: 1084

SEQ ID NO: 1175 - DNA, 375 bp, synthetic construct; identical to SEQ ID NO: 1085
  source 1..375: mol_type = other DNA

SEQ ID NO: 1176 - protein, 9 aa, synthetic construct
TGAVTTSNY

SEQ ID NO: 1177 - skipped

SEQ ID NO: 1178 - protein, 9 aa, synthetic construct
ALWYSNLWV

SEQ ID NO: 1179 - protein, 110 aa, synthetic construct
DIQMTQSPSSLSASVGDRVTITCRSSTGAVTTSNYANWVQQKPGKAPKGLIGGTLKRAPGVPARFSGSGSGTDFTLTISSLQPEDFATYYCALWYSNLWVFGQGTKVEIK

SEQ ID NO: 1180 - DNA, 330 bp, synthetic construct
  source 1..330: mol_type = other DNA
gatattcaaatgactcaatctccttcttctttatctgcttctgttggtgatcgtgttactattacttgtcgttcttctactggtgctgttactacttctaattatgctaattgggttcaacaaaaacctggtaaagctcctaaaggtttaattggtggtactttaaaacgtgctcctggtgttcctgctcgtttttctggttctggttctggtactgattttactttaactatttcttctttacaacctgaagattttgctacttattattgtgctttatggtattctaatttatgggtttttggtcaaggtactaaagttgaaattaaa

SEQ ID NO: 1181 - protein, 8 aa, synthetic construct
GFTFNTYA

SEQ ID NO: 1182 - protein, 10 aa, synthetic construct
IRSKYNNYAT

SEQ ID NO: 1183 - protein, 16 aa, synthetic construct
VRHGNFGNSYVSWFAY

SEQ ID NO: 1184 - protein, 125 aa, synthetic construct; identical to SEQ ID NO: 1084

SEQ ID NO: 1185 - DNA, 375 bp, synthetic construct; identical to SEQ ID NO: 1085
  source 1..375: mol_type = other DNA

SEQ ID NO: 1186 - protein, 9 aa, synthetic construct
TGAVTTSNY

SEQ ID NO: 1187 - skipped

SEQ ID NO: 1188 - protein, 9 aa, synthetic construct
ALWYSNLWV

SEQ ID NO: 1189 - protein, 110 aa, synthetic construct
DIQMTQSPSSLSASVGDRVTITCRSSTGAVTTSNYANWVQQKPGKAPKGLIGAYNKRAPGVPARFSGSGSGTDFTLTISSLQPEDFATYYCALWYSNLWVFGQGTKVEIK

SEQ ID NO: 1190 - DNA, 330 bp, synthetic construct
  source 1..330: mol_type = other DNA
gatattcaaatgactcaatctccttcttctttatctgcttctgttggtgatcgtgttactattacttgtcgttcttctactggtgctgttactacttctaattatgctaattgggttcaacaaaaacctggtaaagctcctaaaggtttaattggtgcttataataaacgtgctcctggtgttcctgctcgtttttctggttctggttctggtactgattttactttaactatttcttctttacaacctgaagattttgctacttattattgtgctttatggtattctaatttatgggtttttggtcaaggtactaaagttgaaattaaa

SEQ ID NO: 1191 - protein, 8 aa, synthetic construct
GFTFNTYA

SEQ ID NO: 1192 - protein, 10 aa, synthetic construct
IRSKYNNYAT

SEQ ID NO: 1193 - protein, 16 aa, synthetic construct
VRHGNFGNSYVSWFAY

SEQ ID NO: 1194 - protein, 125 aa, synthetic construct; identical to SEQ ID NO: 1084

SEQ ID NO: 1195 - DNA, 375 bp, synthetic construct; identical to SEQ ID NO: 1085
  source 1..375: mol_type = other DNA

SEQ ID NO: 1196 - protein, 9 aa, synthetic construct
TGAVTTSNY

SEQ ID NO: 1197 - skipped

SEQ ID NO: 1198 - protein, 9 aa, synthetic construct
ALWYSNLWV

SEQ ID NO: 1199 - protein, 110 aa, synthetic construct
DIQMTQSPSSLSASVGDRVTITCRSSTGAVTTSNYANWVQQKPGKAPKGLIGGQNKRAPGVPARFSGSGSGTDFTLTISSLQPEDFATYYCALWYSNLWVFGQGTKVEIK

SEQ ID NO: 1200 - DNA, 330 bp, synthetic construct
  source 1..330: mol_type = other DNA
gatattcaaatgactcaatctccttcttctttatctgcttctgttggtgatcgtgttactattacttgtcgttcttctactggtgctgttactacttctaattatgctaattgggttcaacaaaaacctggtaaagctcctaaaggtttaattggtggtcaaaataaacgtgctcctggtgttcctgctcgtttttctggttctggttctggtactgattttactttaactatttcttctttacaacctgaagattttgctacttattattgtgctttatggtattctaatttatgggtttttggtcaaggtactaaagttgaaattaaa

SEQ ID NO: 1201 - protein, 8 aa, synthetic construct
GFTFNTYA

SEQ ID NO: 1202 - protein, 10 aa, synthetic construct
IRSKYNNYAT

SEQ ID NO: 1203 - protein, 16 aa, synthetic construct
VRHGNFGNSYVSWFAY

SEQ ID NO: 1204 - protein, 125 aa, synthetic construct; identical to SEQ ID NO: 1084

SEQ ID NO: 1205 - DNA, 375 bp, synthetic construct; identical to SEQ ID NO: 1085
  source 1..375: mol_type = other DNA

SEQ ID NO: 1206 - protein, 9 aa, synthetic construct
TGAVTTSNY

SEQ ID NO: 1207 - skipped

SEQ ID NO: 1208 - protein, 9 aa, synthetic construct
ALWYSNLWV

SEQ ID NO: 1209 - protein, 110 aa, synthetic construct
DIQMTQSPSSLSASVGDRVTITCRSSTGAVTTSNYANWVQQKPGKAPKGLIGSTDKRAPGVPARFSGSGSGTDFTLTISSLQPEDFATYYCALWYSNLWVFGQGTKVEIK

SEQ ID NO: 1210 - DNA, 330 bp, synthetic construct
  source 1..330: mol_type = other DNA
gatattcaaatgactcaatctccttcttctttatctgcttctgttggtgatcgtgttactattacttgtcgttcttctactggtgctgttactacttctaattatgctaattgggttcaacaaaaacctggtaaagctcctaaaggtttaattggttctactgataaacgtgctcctggtgttcctgctcgtttttctggttctggttctggtactgattttactttaactatttcttctttacaacctgaagattttgctacttattattgtgctttatggtattctaatttatgggtttttggtcaaggtactaaagttgaaattaaa

SEQ ID NO: 1211 - protein, 8 aa, synthetic construct
GFTFNTYA

SEQ ID NO: 1212 - protein, 10 aa, synthetic construct
IRSKYNNYAT

SEQ ID NO: 1213 - protein, 16 aa, synthetic construct
VRHGNFGNSYVSWFAY

SEQ ID NO: 1214 - protein, 125 aa, synthetic construct; identical to SEQ ID NO: 1084

SEQ ID NO: 1215 - DNA, 375 bp, synthetic construct; identical to SEQ ID NO: 1085
  source 1..375: mol_type = other DNA

SEQ ID NO: 1216 - protein, 9 aa, synthetic construct
TGAVTTSNY

SEQ ID NO: 1217 - skipped

SEQ ID NO: 1218 - protein, 9 aa, synthetic construct
ALYYSFSWV

SEQ ID NO: 1219 - protein, 110 aa, synthetic construct
DIQMTQSPSSLSASVGDRVTITCRSSTGAVTTSNYANWVQQKPGKAPKGLIGGTNKRAPGVPARFSGSGSGTDFTLTISSLQPEDFATYYCALYYSFSWVFGQGTKVEIK

SEQ ID NO: 1220 - DNA, 330 bp, synthetic construct
  source 1..330: mol_type = other DNA
gatattcaaatgactcaatctccttcttctttatctgcttctgttggtgatcgtgttactattacttgtcgttcttctactggtgctgttactacttctaattatgctaattgggttcaacaaaaacctggtaaagctcctaaaggtttaattggtggtactaataaacgtgctcctggtgttcctgctcgtttttctggttctggttctggtactgattttactttaactatttcttctttacaacctgaagattttgctacttattattgtgctttatattattctttttcttgggtttttggtcaaggtactaaagttgaaattaaa

SEQ ID NO: 1221 - protein, 8 aa, synthetic construct
GFTFNTYA

SEQ ID NO: 1222 - protein, 10 aa, synthetic construct
IRSKYNNYAT

SEQ ID NO: 1223 - protein, 16 aa, synthetic construct
VRHGNFGNSYVSWFAY

SEQ ID NO: 1224 - protein, 125 aa, synthetic construct; identical to SEQ ID NO: 1084

SEQ ID NO: 1225 - DNA, 375 bp, synthetic construct; identical to SEQ ID NO: 1085
  source 1..375: mol_type = other DNA

SEQ ID NO: 1226 - protein, 9 aa, synthetic construct
TGAVTTSNY

SEQ ID NO: 1227 - skipped

SEQ ID NO: 1228 - protein, 9 aa, synthetic construct
QTWGNNIWV

SEQ ID NO: 1229 - protein, 110 aa, synthetic construct
DIQMTQSPSSLSASVGDRVTITCRSSTGAVTTSNYANWVQQKPGKAPKGLIGGTNKRAPGVPARFSGSGSGTDFTLTISSLQPEDFATYYCQTWGNNIWVFGQGTKVEIK

SEQ ID NO: 1230 - DNA, 330 bp, synthetic construct
  source 1..330: mol_type = other DNA
gatattcaaatgactcaatctccttcttctttatctgcttctgttggtgatcgtgttactattacttgtcgttcttctactggtgctgttactacttctaattatgctaattgggttcaacaaaaacctggtaaagctcctaaaggtttaattggtggtactaataaacgtgctcctggtgttcctgctcgtttttctggttctggttctggtactgattttactttaactatttcttctttacaacctgaagattttgctacttattattgtcaaacttggggtaataatatttgggtttttggtcaaggtactaaagttgaaattaaa

SEQ ID NO: 1231 - protein, 8 aa, synthetic construct
GFTFNTYA

SEQ ID NO: 1232 - protein, 10 aa, synthetic construct
IRSKYNNYAT

SEQ ID NO: 1233 - protein, 16 aa, synthetic construct
VRHGNFGNSYVSWFAY

SEQ ID NO: 1234 - protein, 125 aa, synthetic construct; identical to SEQ ID NO: 1084

SEQ ID NO: 1235 - DNA, 375 bp, synthetic construct; identical to SEQ ID NO: 1085
  source 1..375: mol_type = other DNA

SEQ ID NO: 1236 - protein, 9 aa, synthetic construct
TGAVTTSNY

SEQ ID NO: 1237 - skipped

SEQ ID NO: 1238 - protein, 9 aa, synthetic construct
AIWYSRVWV

SEQ ID NO: 1239 - protein, 110 aa, synthetic construct
DIQMTQSPSSLSASVGDRVTITCRSSTGAVTTSNYANWVQQKPGKAPKGLIGGTNKRAPGVPARFSGSGSGTDFTLTISSLQPEDFATYYCAIWYSRVWVFGQGTKVEIK

SEQ ID NO: 1240 - DNA, 330 bp, synthetic construct
  source 1..330: mol_type = other DNA
gatattcaaatgactcaatctccttcttctttatctgcttctgttggtgatcgtgttactattacttgtcgttcttctactggtgctgttactacttctaattatgctaattgggttcaacaaaaacctggtaaagctcctaaaggtttaattggtggtactaataaacgtgctcctggtgttcctgctcgtttttctggttctggttctggtactgattttactttaactatttcttctttacaacctgaagattttgctacttattattgtgctatttggtattctcgtgtttgggtttttggtcaaggtactaaagttgaaattaaa

SEQ ID NO: 1241 - protein, 8 aa, synthetic construct
GFTFNTYA

SEQ ID NO: 1242 - protein, 10 aa, synthetic construct
IRSKYNNYAT

SEQ ID NO: 1243 - protein, 16 aa, synthetic construct
VRHGNFGNSYVSWFAY

SEQ ID NO: 1244 - protein, 125 aa, synthetic construct; identical to SEQ ID NO: 1084

SEQ ID NO: 1245 - DNA, 375 bp, synthetic construct; identical to SEQ ID NO: 1085
  source 1..375: mol_type = other DNA

SEQ ID NO: 1246 - protein, 9 aa, synthetic construct
TGAVTTSNY

SEQ ID NO: 1247 - skipped

SEQ ID NO: 1248 - protein, 9 aa, synthetic construct
AIWYSTSWV

SEQ ID NO: 1249 - protein, 110 aa, synthetic construct
DIQMTQSPSSLSASVGDRVTITCRSSTGAVTTSNYANWVQQKPGKAPKGLIGGTNKRAPGVPARFSGSGSGTDFTLTISSLQPEDFATYYCAIWYSTSWVFGQGTKVEIK

SEQ ID NO: 1250 - DNA, 330 bp, synthetic construct
  source 1..330: mol_type = other DNA
gatattcaaatgactcaatctccttcttctttatctgcttctgttggtgatcgtgttactattacttgtcgttcttctactggtgctgttactacttctaattatgctaattgggttcaacaaaaacctggtaaagctcctaaaggtttaattggtggtactaataaacgtgctcctggtgttcctgctcgtttttctggttctggttctggtactgattttactttaactatttcttctttacaacctgaagattttgctacttattattgtgctatttggtattctacttcttgggtttttggtcaaggtactaaagttgaaattaaa

SEQ ID NO: 1251 - protein, 8 aa, synthetic construct
GFTFNTYA

SEQ ID NO: 1252 - protein, 10 aa, synthetic construct
IRSKYNNYAT

SEQ ID NO: 1253 - protein, 16 aa, synthetic construct
VRHGNFGNSYVSWFAY

SEQ ID NO: 1254 - protein, 125 aa, synthetic construct; identical to SEQ ID NO: 1084

SEQ ID NO: 1255 - DNA, 375 bp, synthetic construct; identical to SEQ ID NO: 1085
  source 1..375: mol_type = other DNA

SEQ ID NO: 1256 - protein, 9 aa, synthetic construct
TGAVTTSNY

SEQ ID NO: 1257 - skipped

SEQ ID NO: 1258 - protein, 9 aa, synthetic construct
VIWHSGAWV

SEQ ID NO: 1259 - protein, 110 aa, synthetic construct
DIQMTQSPSSLSASVGDRVTITCRSSTGAVTTSNYANWVQQKPGKAPKGLIGGTNKRAPGVPARFSGSGSGTDFTLTISSLQPEDFATYYCVIWHSGAWVFGQGTKVEIK

SEQ ID NO: 1260 - DNA, 330 bp, synthetic construct
  source 1..330: mol_type = other DNA
gatattcaaatgactcaatctccttcttctttatctgcttctgttggtgatcgtgttactattacttgtcgttcttctactggtgctgttactacttctaattatgctaattgggttcaacaaaaacctggtaaagctcctaaaggtttaattggtggtactaataaacgtgctcctggtgttcctgctcgtttttctggttctggttctggtactgattttactttaactatttcttctttacaacctgaagattttgctacttattattgtgttatttggcattctggtgcttgggtttttggtcaaggtactaaagttgaaattaaa

SEQ ID NO: 1261 - protein, 8 aa, synthetic construct
GFTFNTYA

SEQ ID NO: 1262 - protein, 10 aa, synthetic construct
IRSKYNNYAT

SEQ ID NO: 1263 - protein, 16 aa, synthetic construct
VRHGNFGNSYVSWFAY

SEQ ID NO: 1264 - protein, 125 aa, synthetic construct; identical to SEQ ID NO: 1084

SEQ ID NO: 1265 - DNA, 375 bp, synthetic construct; identical to SEQ ID NO: 1085
  source 1..375: mol_type = other DNA

SEQ ID NO: 1266 - protein, 9 aa, synthetic construct
TGAVTTSNY

SEQ ID NO: 1267 - skipped

SEQ ID NO: 1268 - protein, 9 aa, synthetic construct
VVWHSSLWL

SEQ ID NO: 1269 - protein, 110 aa, synthetic construct
DIQMTQSPSSLSASVGDRVTITCRSSTGAVTTSNYANWVQQKPGKAPKGLIGGTNKRAPGVPARFSGSGSGTDFTLTISSLQPEDFATYYCVVWHSSLWLFGQGTKVEIK

SEQ ID NO: 1270 - DNA, 330 bp, synthetic construct
  source 1..330: mol_type = other DNA
gatattcaaatgactcaatctccttcttctttatctgcttctgttggtgatcgtgttactattacttgtcgttcttctactggtgctgttactacttctaattatgctaattgggttcaacaaaaacctggtaaagctcctaaaggtttaattggtggtactaataaacgtgctcctggtgttcctgctcgtttttctggttctggttctggtactgattttactttaactatttcttctttacaacctgaagattttgctacttattattgtgttgtttggcattcttctttatggttatttggtcaaggtactaaagttgaaattaaa

SEQ ID NO: 1271 - protein, 8 aa, synthetic construct
GFTFNTYA

SEQ ID NO: 1272 - protein, 10 aa, synthetic construct
IRSKYNNYAT

SEQ ID NO: 1273 - protein, 16 aa, synthetic construct
VRHGNFGNSYVSWFAY

SEQ ID NO: 1274 - protein, 125 aa, synthetic construct; identical to SEQ ID NO: 1084

SEQ ID NO: 1275 - DNA, 375 bp, synthetic construct; identical to SEQ ID NO: 1085
  source 1..375: mol_type = other DNA

SEQ ID NO: 1276 - protein, 9 aa, synthetic construct
TGAVTTSNY

SEQ ID NO: 1277 - skipped

SEQ ID NO: 1278 - protein, 9 aa, synthetic construct
LLSYSRSWV

SEQ ID NO: 1279 - protein, 110 aa, synthetic construct
DIQMTQSPSSLSASVGDRVTITCRSSTGAVTTSNYANWVQQKPGKAPKGLIGGTNKRAPGVPARFSGSGSGTDFTLTISSLQPEDFATYYCLLSYSRSWVFGQGTKVEIK

SEQ ID NO: 1280 - DNA, 330 bp, synthetic construct
  source 1..330: mol_type = other DNA
gatattcaaatgactcaatctccttcttctttatctgcttctgttggtgatcgtgttactattacttgtcgttcttctactggtgctgttactacttctaattatgctaattgggttcaacaaaaacctggtaaagctcctaaaggtttaattggtggtactaataaacgtgctcctggtgttcctgctcgtttttctggttctggttctggtactgattttactttaactatttcttctttacaacctgaagattttgctacttattattgtttattatcttattctcgttcttgggtttttggtcaaggtactaaagttgaaattaaa

SEQ ID NO: 1281 - protein, 8 aa, synthetic construct
GFTFNTYA

SEQ ID NO: 1282 - protein, 10 aa, synthetic construct
IRSKYNNYAT

SEQ ID NO: 1283 - protein, 16 aa, synthetic construct
VRHGNFGNSYVSWFAY

SEQ ID NO: 1284 - protein, 125 aa, synthetic construct; identical to SEQ ID NO: 1084

SEQ ID NO: 1285 - DNA, 375 bp, synthetic construct; identical to SEQ ID NO: 1085
  source 1..375: mol_type = other DNA

SEQ ID NO: 1286 - protein, 9 aa, synthetic construct
TGAVTTSNY

SEQ ID NO: 1287 - skipped

SEQ ID NO: 1288 - protein, 9 aa, synthetic construct
LLFYNRLWV

SEQ ID NO: 1289 - protein, 110 aa, synthetic construct
DIQMTQSPSSLSASVGDRVTITCRSSTGAVTTSNYANWVQQKPGKAPKGLIGGTNKRAPGVPARFSGSGSGTDFTLTISSLQPEDFATYYCLLFYNRLWVFGQGTKVEIK

SEQ ID NO: 1290 - DNA, 330 bp, synthetic construct
  source 1..330: mol_type = other DNA
gatattcaaatgactcaatctccttcttctttatctgcttctgttggtgatcgtgttactattacttgtcgttcttctactggtgctgttactacttctaattatgctaattgggttcaacaaaaacctggtaaagctcctaaaggtttaattggtggtactaataaacgtgctcctggtgttcctgctcgtttttctggttctggttctggtactgattttactttaactatttcttctttacaacctgaagattttgctacttattattgtttattattttataatcgtttatgggtttttggtcaaggtactaaagttgaaattaaa

SEQ ID NO: 1291 - protein, 8 aa, synthetic construct
GFTFNTYA

SEQ ID NO: 1292 - protein, 10 aa, synthetic construct
IRSKYNNYAT

SEQ ID NO: 1293 - protein, 16 aa, synthetic construct
VRHGNFGNSYVSWFAY

SEQ ID NO: 1294 - protein, 125 aa, synthetic construct; identical to SEQ ID NO: 1084

SEQ ID NO: 1295 - DNA, 375 bp, synthetic construct; identical to SEQ ID NO: 1085
  source 1..375: mol_type = other DNA

SEQ ID NO: 1296 - protein, 9 aa, synthetic construct
TGAVTTSNY

SEQ ID NO: 1297 - skipped

SEQ ID NO: 1298 - protein, 9 aa, synthetic construct
VIWHGSVWV

SEQ ID NO: 1299 - protein, 110 aa, synthetic construct
DIQMTQSPSSLSASVGDRVTITCRSSTGAVTTSNYANWVQQKPGKAPKGLIGGTNKRAPGVPARFSGSGSGTDFTLTISSLQPEDFATYYCVIWHGSVWVFGQGTKVEIK

SEQ ID NO: 1300 - DNA, 330 bp, synthetic construct
  source 1..330: mol_type = other DNA
gatattcaaatgactcaatctccttcttctttatctgcttctgttggtgatcgtgttactattacttgtcgttcttctactggtgctgttactacttctaattatgctaattgggttcaacaaaaacctggtaaagctcctaaaggtttaattggtggtactaataaacgtgctcctggtgttcctgctcgtttttctggttctggttctggtactgattttactttaactatttcttctttacaacctgaagattttgctacttattattgtgttatttggcatggttctgtttgggtttttggtcaaggtactaaagttgaaattaaa

SEQ ID NO: 1301 - protein, 8 aa, synthetic construct
GFTFNTYA

SEQ ID NO: 1302 - protein, 10 aa, synthetic construct
IRSKYNNYAT

SEQ ID NO: 1303 - protein, 16 aa, synthetic construct
VRHGNFGNSYVSWFAY

SEQ ID NO: 1304 - protein, 125 aa, synthetic construct; identical to SEQ ID NO: 1084

SEQ ID NO: 1305 - DNA, 375 bp, synthetic construct; identical to SEQ ID NO: 1085
  source 1..375: mol_type = other DNA

SEQ ID NO: 1306 - protein, 9 aa, synthetic construct
TGAVTTSNY

SEQ ID NO: 1307 - skipped

SEQ ID NO: 1308 - protein, 9 aa, synthetic construct
ANWKSNILV

SEQ ID NO: 1309 - protein, 110 aa, synthetic construct
DIQMTQSPSSLSASVGDRVTITCRSSTGAVTTSNYANWVQQKPGKAPKGLIGGTNKRAPGVPARFSGSGSGTDFTLTISSLQPEDFATYYCANWKSNILVFGQGTKVEIK

SEQ ID NO: 1310 - DNA, 330 bp, synthetic construct
  source 1..330: mol_type = other DNA
gatattcaaatgactcaatctccttcttctttatctgcttctgttggtgatcgtgttactattacttgtcgttcttctactggtgctgttactacttctaattatgctaattgggttcaacaaaaacctggtaaagctcctaaaggtttaattggtggtactaataaacgtgctcctggtgttcctgctcgtttttctggttctggttctggtactgattttactttaactatttcttctttacaacctgaagattttgctacttattattgtgctaattggaaatctaatattttagtttttggtcaaggtactaaagttgaaattaaa

SEQ ID NO: 1311 - protein, 8 aa, synthetic construct
GFTFNTYA

SEQ ID NO: 1312 - protein, 10 aa, synthetic construct
IRSKYNNYAT

SEQ ID NO: 1313 - protein, 16 aa, synthetic construct
VRHGNFGNSYVSWFAY

SEQ ID NO: 1314 - protein, 125 aa, synthetic construct; identical to SEQ ID NO: 1084

SEQ ID NO: 1315 - DNA, 375 bp, synthetic construct; identical to SEQ ID NO: 1085
  source 1..375: mol_type = other DNA

SEQ ID NO: 1316 - protein, 9 aa, synthetic construct
TGAVTTSNY

SEQ ID NO: 1317 - skipped

SEQ ID NO: 1318 - protein, 9 aa, synthetic construct
RIWHSSSWV

SEQ ID NO: 1319 - protein, 110 aa, synthetic construct
DIQMTQSPSSLSASVGDRVTITCRSSTGAVTTSNYANWVQQKPGKAPKGLIGGTNKRAPGVPARFSGSGSGTDFTLTISSLQPEDFATYYCRIWHSSSWVFGQGTKVEIK

SEQ ID NO: 1320 - DNA, 330 bp, synthetic construct
  source 1..330: mol_type = other DNA
gatattcaaatgactcaatctccttcttctttatctgcttctgttggtgatcgtgttactattacttgtcgttcttctactggtgctgttactacttctaattatgctaattgggttcaacaaaaacctggtaaagctcctaaaggtttaattggtggtactaataaacgtgctcctggtgttcctgctcgtttttctggttctggttctggtactgattttactttaactatttcttctttacaacctgaagattttgctacttattattgtcgtatttggcattcttcttcttgggtttttggtcaaggtactaaagttgaaattaaa

SEQ ID NO: 1321 - protein, 8 aa, synthetic construct
GFTFNTYA

SEQ ID NO: 1322 - protein, 10 aa, synthetic construct
IRSKYNNYAT

SEQ ID NO: 1323 - protein, 16 aa, synthetic construct
VRHGNFGNSYVSWFAY

SEQ ID NO: 1324 - protein, 125 aa, synthetic construct; identical to SEQ ID NO: 1084

SEQ ID NO: 1325 - DNA, 375 bp, synthetic construct; identical to SEQ ID NO: 1085
  source 1..375: mol_type = other DNA

SEQ ID NO: 1326 - protein, 9 aa, synthetic construct
TGAVTTSNY

SEQ ID NO: 1327 - skipped

SEQ ID NO: 1328 - protein, 9 aa, synthetic construct
RLDYSGVWV

SEQ ID NO: 1329 - protein, 110 aa, synthetic construct
DIQMTQSPSSLSASVGDRVTITCRSSTGAVTTSNYANWVQQKPGKAPKGLIGGTNKRAPGVPARFSGSGSGTDFTLTISSLQPEDFATYYCRLDYSGVWVFGQGTKVEIK

SEQ ID NO: 1330 - DNA, 330 bp, synthetic construct
  source 1..330: mol_type = other DNA
gatattcaaatgactcaatctccttcttctttatctgcttctgttggtgatcgtgttactattacttgtcgttcttctactggtgctgttactacttctaattatgctaattgggttcaacaaaaacctggtaaagctcctaaaggtttaattggtggtactaataaacgtgctcctggtgttcctgctcgtttttctggttctggttctggtactgattttactttaactatttcttctttacaacctgaagattttgctacttattattgtcgtttagattattctggtgtttgggtttttggtcaaggtactaaagttgaaattaaa

SEQ ID NO: 1331 - protein, 8 aa, synthetic construct
GFTFNTYA

SEQ ID NO: 1332 - protein, 10 aa, synthetic construct
IRSKYNNYAT

SEQ ID NO: 1333 - protein, 16 aa, synthetic construct
VRHGNFGNSYVSWFAY

SEQ ID NO: 1334 - protein, 125 aa, synthetic construct; identical to SEQ ID NO: 1084

SEQ ID NO: 1335 - DNA, 375 bp, synthetic construct; identical to SEQ ID NO: 1085
  source 1..375: mol_type = other DNA

SEQ ID NO: 1336 - protein, 9 aa, synthetic construct
TGAVTTSNY

SEQ ID NO: 1337 - skipped

SEQ ID NO: 1338 - protein, 9 aa, synthetic construct
VIWHNLAWV

SEQ ID NO: 1339 - protein, 110 aa, synthetic construct
DIQMTQSPSSLSASVGDRVTITCRSSTGAVTTSNYANWVQQKPGKAPKGLIGGTNKRAPGVPARFSGSGSGTDFTLTISSLQPEDFATYYCVIWHNLAWVFGQGTKVEIK

SEQ ID NO: 1340 - DNA, 330 bp, synthetic construct
  source 1..330: mol_type = other DNA
gatattcaaatgactcaatctccttcttctttatctgcttctgttggtgatcgtgttactattacttgtcgttcttctactggtgctgttactacttctaattatgctaattgggttcaacaaaaacctggtaaagctcctaaaggtttaattggtggtactaataaacgtgctcctggtgttcctgctcgtttttctggttctggttctggtactgattttactttaactatttcttctttacaacctgaagattttgctacttattattgtgttatttggcataatttagcttgggtttttggtcaaggtactaaagttgaaattaaa

SEQ ID NO: 1341 - protein, 8 aa, synthetic construct
GFTFNTYA

SEQ ID NO: 1342 - protein, 10 aa, synthetic construct
IRSKYNNYAT

SEQ ID NO: 1343 - protein, 16 aa, synthetic construct
VRHGNFGNSYVSWFAY

SEQ ID NO: 1344 - protein, 125 aa, synthetic construct; identical to SEQ ID NO: 1084

SEQ ID NO: 1345 - DNA, 375 bp, synthetic construct; identical to SEQ ID NO: 1085
  source 1..375: mol_type = other DNA

SEQ ID NO: 1346 - protein, 9 aa, synthetic construct
TGAVTTSNY

SEQ ID NO: 1347 - skipped

SEQ ID NO: 1348 - protein, 9 aa, synthetic construct
TIWHSGVWV

SEQ ID NO: 1349 - protein, 110 aa, synthetic construct
DIQMTQSPSSLSASVGDRVTITCRSSTGAVTTSNYANWVQQKPGKAPKGLIGGTNKRAPGVPARFSGSGSGTDFTLTISSLQPEDFATYYCTIWHSGVWVFGQGTKVEIK

SEQ ID NO: 1350 - DNA, 330 bp, synthetic construct
  source 1..330: mol_type = other DNA
gatattcaaatgactcaatctccttcttctttatctgcttctgttggtgatcgtgttactattacttgtcgttcttctactggtgctgttactacttctaattatgctaattgggttcaacaaaaacctggtaaagctcctaaaggtttaattggtggtactaataaacgtgctcctggtgttcctgctcgtttttctggttctggttctggtactgattttactttaactatttcttctttacaacctgaagattttgctacttattattgtactatttggcattctggtgtttgggtttttggtcaaggtactaaagttgaaattaaa

SEQ ID NO: 1351 - protein, 8 aa, synthetic construct
GFTFNTYA

SEQ ID NO: 1352 - protein, 10 aa, synthetic construct
IRSKYNNYAT

SEQ ID NO: 1353 - protein, 16 aa, synthetic construct
VRHGNFGNSYVSWFAY

SEQ ID NO: 1354 - protein, 125 aa, synthetic construct; identical to SEQ ID NO: 1084

SEQ ID NO: 1355 - DNA, 375 bp, synthetic construct; identical to SEQ ID NO: 1085
  source 1..375: mol_type = other DNA

SEQ ID NO: 1356 - protein, 9 aa, synthetic construct
TGAVTTSNY

SEQ ID NO: 1357 - skipped

SEQ ID NO: 1358 - protein, 9 aa, synthetic construct
AIWPGDAWV

SEQ ID NO: 1359 - protein, 110 aa, synthetic construct
DIQMTQSPSSLSASVGDRVTITCRSSTGAVTTSNYANWVQQKPGKAPKGLIGGTNKRAPGVPARFSGSGSGTDFTLTISSLQPEDFATYYCAIWPGDAWVFGQGTKVEIK

SEQ ID NO: 1360 - DNA, 330 bp, synthetic construct
  source 1..330: mol_type = other DNA
gatattcaaatgactcaatctccttcttctttatctgcttctgttggtgatcgtgttactattacttgtcgttcttctactggtgctgttactacttctaattatgctaattgggttcaacaaaaacctggtaaagctcctaaaggtttaattggtggtactaataaacgtgctcctggtgttcctgctcgtttttctggttctggttctggtactgattttactttaactatttcttctttacaacctgaagattttgctacttattattgtgctatttggcctggtgatgcttgggtttttggtcaaggtactaaagttgaaattaaa

SEQ ID NO: 1361 - protein, 8 aa, synthetic construct
GFTFNTYA

SEQ ID NO: 1362 - protein, 10 aa, synthetic construct
IRSKYNNYAT

SEQ ID NO: 1363 - protein, 16 aa, synthetic construct
VRHGNFGNSYVSWFAY

SEQ ID NO: 1364 - protein, 125 aa, synthetic construct; identical to SEQ ID NO: 1084

SEQ ID NO: 1365 - DNA, 375 bp, synthetic construct; identical to SEQ ID NO: 1085
  source 1..375: mol_type = other DNA

SEQ ID NO: 1366 - protein, 9 aa, synthetic construct
TGAVTTSNY

SEQ ID NO: 1367 - skipped

SEQ ID NO: 1368 - protein, 9 aa, synthetic construct
LTWHTSAWV

SEQ ID NO: 1369 - protein, 110 aa, synthetic construct
DIQMTQSPSSLSASVGDRVTITCRSSTGAVTTSNYANWVQQKPGKAPKGLIGGTNKRAPGVPARFSGSGSGTDFTLTISSLQPEDFATYYCLTWHTSAWVFGQGTKVEIK

SEQ ID NO: 1370 - DNA, 330 bp, synthetic construct
  source 1..330: mol_type = other DNA
gatattcaaatgactcaatctccttcttctttatctgcttctgttggtgatcgtgttactattacttgtcgttcttctactggtgctgttactacttctaattatgctaattgggttcaacaaaaacctggtaaagctcctaaaggtttaattggtggtactaataaacgtgctcctggtgttcctgctcgtttttctggttctggttctggtactgattttactttaactatttcttctttacaacctgaagattttgctacttattattgtttaacttggcatacttctgcttgggtttttggtcaaggtactaaagttgaaattaaa

SEQ ID NO: 1371 - protein, 8 aa, synthetic construct
GFTFNTYA

SEQ ID NO: 1372 - protein, 10 aa, synthetic construct
IRSKYNNYAT

SEQ ID NO: 1373 - protein, 16 aa, synthetic construct
VRHGNFGNSYVSWFAY

SEQ ID NO: 1374 - protein, 125 aa, synthetic construct; identical to SEQ ID NO: 1084

SEQ ID NO: 1375 - DNA, 375 bp, synthetic construct; identical to SEQ ID NO: 1085
  source 1..375: mol_type = other DNA

SEQ ID NO: 1376 - protein, 9 aa, synthetic construct
TGAVTTSNY

SEQ ID NO: 1377 - skipped

SEQ ID NO: 1378 - protein, 9 aa, synthetic construct
QAWYSNIGV

SEQ ID NO: 1379 - protein, 110 aa, synthetic construct
DIQMTQSPSSLSASVGDRVTITCRSSTGAVTTSNYANWVQQKPGKAPKGLIGGTNKRAPGVPARFSGSGSGTDFTLTISSLQPEDFATYYCQAWYSNIGVFGQGTKVEIK

SEQ ID NO: 1380 - DNA, 330 bp, synthetic construct
  source 1..330: mol_type = other DNA
gatattcaaatgactcaatctccttcttctttatctgcttctgttggtgatcgtgttactattacttgtcgttcttctactggtgctgttactacttctaattatgctaattgggttcaacaaaaacctggtaaagctcctaaaggtttaattggtggtactaataaacgtgctcctggtgttcctgctcgtttttctggttctggttctggtactgattttactttaactatttcttctttacaacctgaagattttgctacttattattgtcaagcttggtattctaatattggtgtttttggtcaaggtactaaagttgaaattaaa

SEQ ID NO: 1381 - protein, 8 aa, synthetic construct
GFTFNTYA

SEQ ID NO: 1382 - protein, 10 aa, synthetic construct
IRSKYNNYAT

SEQ ID NO: 1383 - protein, 16 aa, synthetic construct
VRHGNFGNSYVSWFAY

SEQ ID NO: 1384 - protein, 125 aa, synthetic construct; identical to SEQ ID NO: 1084

SEQ ID NO: 1385 - DNA, 375 bp, synthetic construct; identical to SEQ ID NO: 1085
  source 1..375: mol_type = other DNA

SEQ ID NO: 1386 - protein, 9 aa, synthetic construct
TGAVTTSNY

SEQ ID NO: 1387 - skipped

SEQ ID NO: 1388 - protein, 9 aa, synthetic construct
AIWYSTAYI

SEQ ID NO: 1389 - protein, 110 aa, synthetic construct
DIQMTQSPSSLSASVGDRVTITCRSSTGAVTTSNYANWVQQKPGKAPKGLIGGTNKRAPGVPARFSGSGSGTDFTLTISSLQPEDFATYYCAIWYSTAYIFGQGTKVEIK

SEQ ID NO: 1390 - DNA, 330 bp, synthetic construct
  source 1..330: mol_type = other DNA
gatattcaaatgactcaatctccttcttctttatctgcttctgttggtgatcgtgttactattacttgtcgttcttctactggtgctgttactacttctaattatgctaattgggttcaacaaaaacctggtaaagctcctaaaggtttaattggtggtactaataaacgtgctcctggtgttcctgctcgtttttctggttctggttctggtactgattttactttaactatttcttctttacaacctgaagattttgctacttattattgtgctatttggtattctactgcttatatttttggtcaaggtactaaagttgaaattaaa

SEQ ID NO: 1391 - protein, 8 aa, synthetic construct
GFTFNTYA

SEQ ID NO: 1392 - protein, 10 aa, synthetic construct
IRSKYNNYAT

SEQ ID NO: 1393 - protein, 16 aa, synthetic construct
VRHGNFGNSYVSWFAY

SEQ ID NO: 1394 - protein, 125 aa, synthetic construct; identical to SEQ ID NO: 1084

SEQ ID NO: 1395 - DNA, 375 bp, synthetic construct; identical to SEQ ID NO: 1085
  source 1..375: mol_type = other DNA

SEQ ID NO: 1396 - protein, 9 aa, synthetic construct
TGAVTTSNY

SEQ ID NO: 1397 - skipped

SEQ ID NO: 1398 - protein, 9 aa, synthetic construct
LIWYNNIWV

SEQ ID NO: 1399 - protein, 110 aa, synthetic construct
DIQMTQSPSSLSASVGDRVTITCRSSTGAVTTSNYANWVQQKPGKAPKGLIGGTNKRAPGVPARFSGSGSGTDFTLTISSLQPEDFATYYCLIWYNNIWVFGQGTKVEIK

SEQ ID NO: 1400 - DNA, 330 bp, synthetic construct
  source 1..330: mol_type = other DNA
gatattcaaatgactcaatctccttcttctttatctgcttctgttggtgatcgtgttactattacttgtcgttcttctactggtgctgttactacttctaattatgctaattgggttcaacaaaaacctggtaaagctcctaaaggtttaattggtggtactaataaacgtgctcctggtgttcctgctcgtttttctggttctggttctggtactgattttactttaactatttcttctttacaacctgaagattttgctacttattattgtttaatttggtataataatatttgggtttttggtcaaggtactaaagttgaaattaaa

SEQ ID NO: 1401 - protein, 8 aa, synthetic construct
GFTFNTYA

SEQ ID NO: 1402 - protein, 10 aa, synthetic construct
IRSKYNNYAT

SEQ ID NO: 1403 - protein, 16 aa, synthetic construct
VRHGNFGNSYVSWFAY

SEQ ID NO: 1404 - protein, 125 aa, synthetic construct; identical to SEQ ID NO: 1084

SEQ ID NO: 1405 - DNA, 375 bp, synthetic construct; identical to SEQ ID NO: 1085
  source 1..375: mol_type = other DNA

SEQ ID NO: 1406 - protein, 9 aa, synthetic construct
TGAVTTSNY

SEQ ID NO: 1407 - skipped

SEQ ID NO: 1408 - protein, 9 aa, synthetic construct
RVWHSDAWV

SEQ ID NO: 1409 - protein, 110 aa, synthetic construct
DIQMTQSPSSLSASVGDRVTITCRSSTGAVTTSNYANWVQQKPGKAPKGLIGGTNKRAPGVPARFSGSGSGTDFTLTISSLQPEDFATYYCRVWHSDAWVFGQGTKVEIK

SEQ ID NO: 1410 - DNA, 330 bp, synthetic construct
  source 1..330: mol_type = other DNA
gatattcaaatgactcaatctccttcttctttatctgcttctgttggtgatcgtgttactattacttgtcgttcttctactggtgctgttactacttctaattatgctaattgggttcaacaaaaacctggtaaagctcctaaaggtttaattggtggtactaataaacgtgctcctggtgttcctgctcgtttttctggttctggttctggtactgattttactttaactatttcttctttacaacctgaagattttgctacttattattgtcgtgtttggcattctgatgcttgggtttttggtcaaggtactaaagttgaaattaaa

SEQ ID NO: 1411 - protein, 8 aa, synthetic construct
GFTFNTYA

SEQ ID NO: 1412 - protein, 10 aa, synthetic construct
IRSKYNNYAT

SEQ ID NO: 1413 - protein, 16 aa, synthetic construct
VRHGNFGNSYVSWFAY

SEQ ID NO: 1414 - protein, 125 aa, synthetic construct; identical to SEQ ID NO: 1084

SEQ ID NO: 1415 - DNA, 375 bp, synthetic construct; identical to SEQ ID NO: 1085
  source 1..375: mol_type = other DNA

SEQ ID NO: 1416 - protein, 9 aa, synthetic construct
TGAVTTSNY

SEQ ID NO: 1417 - skipped

SEQ ID NO: 1418 - protein, 9 aa, synthetic construct
LIWYGSAWV

SEQ ID NO: 1419 - protein, 110 aa, synthetic construct
DIQMTQSPSSLSASVGDRVTITCRSSTGAVTTSNYANWVQQKPGKAPKGLIGGTNKRAPGVPARFSGSGSGTDFTLTISSLQPEDFATYYCLIWYGSAWVFGQGTKVEIK

SEQ ID NO: 1420 - DNA, 330 bp, synthetic construct
  source 1..330: mol_type = other DNA
gatattcaaatgactcaatctccttcttctttatctgcttctgttggtgatcgtgttactattacttgtcgttcttctactggtgctgttactacttctaattatgctaattgggttcaacaaaaacctggtaaagctcctaaaggtttaattggtggtactaataaacgtgctcctggtgttcctgctcgtttttctggttctggttctggtactgattttactttaactatttcttctttacaacctgaagattttgctacttattattgtttaatttggtatggttctgcttgggtttttggtcaaggtactaaagttgaaattaaa

SEQ ID NO: 1421 - protein, 8 aa, synthetic construct
GFTFNTYA

SEQ ID NO: 1422 - protein, 10 aa, synthetic construct
IRSKYNNYAT

SEQ ID NO: 1423 - protein, 16 aa, synthetic construct
VRHGNFGNSYVSWFAY

SEQ ID NO: 1424 - protein, 125 aa, synthetic construct; identical to SEQ ID NO: 1084

SEQ ID NO: 1425 - DNA, 375 bp, synthetic construct; identical to SEQ ID NO: 1085
  source 1..375: mol_type = other DNA

SEQ ID NO: 1426 - protein, 9 aa, synthetic construct
TGAVTTSNY

SEQ ID NO: 1427 - skipped

SEQ ID NO: 1428 - protein, 9 aa, synthetic construct
AAWDVSLWV

SEQ ID NO: 1429 - protein, 110 aa, synthetic construct
DIQMTQSPSSLSASVGDRVTITCRSSTGAVTTSNYANWVQQKPGKAPKGLIGGTNKRAPGVPARFSGSGSGTDFTLTISSLQPEDFATYYCAAWDVSLWVFGQGTKVEIK

SEQ ID NO: 1430 - DNA, 330 bp, synthetic construct
  source 1..330: mol_type = other DNA
gatattcaaatgactcaatctccttcttctttatctgcttctgttggtgatcgtgttactattacttgtcgttcttctactggtgctgttactacttctaattatgctaattgggttcaacaaaaacctggtaaagctcctaaaggtttaattggtggtactaataaacgtgctcctggtgttcctgctcgtttttctggttctggttctggtactgattttactttaactatttcttctttacaacctgaagattttgctacttattattgtgctgcttgggatgtttctttatgggtttttggtcaaggtactaaagttgaaattaaa

SEQ ID NO: 1431 - protein, 8 aa, synthetic construct
GFTFNTYA

SEQ ID NO: 1432 - protein, 10 aa, synthetic construct
IRSKYNNYAT

SEQ ID NO: 1433 - protein, 16 aa, synthetic construct
VRHGNFGNSYVSWFAY

SEQ ID NO: 1434 - protein, 125 aa, synthetic construct; identical to SEQ ID NO: 1084

SEQ ID NO: 1435 - DNA, 375 bp, synthetic construct; identical to SEQ ID NO: 1085
  source 1..375: mol_type = other DNA

SEQ ID NO: 1436 - protein, 9 aa, synthetic construct
TGAVTTSNY

SEQ ID NO: 1437 - skipped

SEQ ID NO: 1438 - protein, 9 aa, synthetic construct
AAWHDNAWV

SEQ ID NO: 1439 - protein, 110 aa, synthetic construct
DIQMTQSPSSLSASVGDRVTITCRSSTGAVTTSNYANWVQQKPGKAPKGLIGGTNKRAPGVPARFSGSGSGTDFTLTISSLQPEDFATYYCAAWHDNAWVFGQGTKVEIK

SEQ ID NO: 1440 - DNA, 330 bp, synthetic construct
  source 1..330: mol_type = other DNA
gatattcaaatgactcaatctccttcttctttatctgcttctgttggtgatcgtgttactattacttgtcgttcttctactggtgctgttactacttctaattatgctaattgggttcaacaaaaacctggtaaagctcctaaaggtttaattggtggtactaataaacgtgctcctggtgttcctgctcgtttttctggttctggttctggtactgattttactttaactatttcttctttacaacctgaagattttgctacttattattgtgctgcttggcatgataatgcttgggtttttggtcaaggtactaaagttgaaattaaa

SEQ ID NO: 1441 - protein, 8 aa, synthetic construct
GFTFNTYA

SEQ ID NO: 1442 - protein, 10 aa, synthetic construct
IRSKYNNYAT

SEQ ID NO: 1443 - protein, 16 aa, synthetic construct
VRHGNFGNSYVSWFAY

SEQ ID NO: 1444 - protein, 125 aa, synthetic construct; identical to SEQ ID NO: 1084

SEQ ID NO: 1445 - DNA, 375 bp, synthetic construct; identical to SEQ ID NO: 1085
  source 1..375: mol_type = other DNA

SEQ ID NO: 1446 - protein, 9 aa, synthetic construct
TGAVTTSNY

SEQ ID NO: 1447 - skipped

SEQ ID NO: 1448 - protein, 9 aa, synthetic construct
QPYYSNNWV

SEQ ID NO: 1449 - protein, 110 aa, synthetic construct
DIQMTQSPSSLSASVGDRVTITCRSSTGAVTTSNYANWVQQKPGKAPKGLIGGTNKRAPGVPARFSGSGSGTDFTLTISSLQPEDFATYYCQPYYSNNWVFGQGTKVEIK

SEQ ID NO: 1450 - DNA, 330 bp, synthetic construct
  source 1..330: mol_type = other DNA
gatattcaaatgactcaatctccttcttctttatctgcttctgttggtgatcgtgttactattacttgtcgttcttctactggtgctgttactacttctaattatgctaattgggttcaacaaaaacctggtaaagctcctaaaggtttaattggtggtactaataaacgtgctcctggtgttcctgctcgtttttctggttctggttctggtactgattttactttaactatttcttctttacaacctgaagattttgctacttattattgtcaaccttattattctaataattgggtttttggtcaaggtactaaagttgaaattaaa

SEQ ID NO: 1451 - protein, 8 aa, synthetic construct
GFTFNTYA

SEQ ID NO: 1452 - protein, 10 aa, synthetic construct
IRSKYNNYAT

SEQ ID NO: 1453 - protein, 16 aa, synthetic construct
VRHGNFGNSYVSWFAY

SEQ ID NO: 1454 - protein, 125 aa, synthetic construct; identical to SEQ ID NO: 1084

SEQ ID NO: 1455 - DNA, 375 bp, synthetic construct; identical to SEQ ID NO: 1085
  source 1..375: mol_type = other DNA

SEQ ID NO: 1456 - protein, 9 aa, synthetic construct
TGAVTTSNY

SEQ ID NO: 1457 - skipped

SEQ ID NO: 1458 - protein, 9 aa, synthetic construct
QAWDRSIWV

SEQ ID NO: 1459 - protein, 110 aa, synthetic construct
DIQMTQSPSSLSASVGDRVTITCRSSTGAVTTSNYANWVQQKPGKAPKGLIGGTNKRAPGVPARFSGSGSGTDFTLTISSLQPEDFATYYCQAWDRSIWVFGQGTKVEIK

SEQ ID NO: 1460 - DNA, 330 bp, synthetic construct
  source 1..330: mol_type = other DNA
gatattcaaatgactcaatctccttcttctttatctgcttctgttggtgatcgtgttactattacttgtcgttcttctactggtgctgttactacttctaattatgctaattgggttcaacaaaaacctggtaaagctcctaaaggtttaattggtggtactaataaacgtgctcctggtgttcctgctcgtttttctggttctggttctggtactgattttactttaactatttcttctttacaacctgaagattttgctacttattattgtcaagcttgggatcgttctatttgggtttttggtcaaggtactaaagttgaaattaaa

SEQ ID NO: 1461 - protein, 8 aa, synthetic construct
GFTFNTYA

SEQ ID NO: 1462 - protein, 10 aa, synthetic construct
IRSKYNNYAT

SEQ ID NO: 1463 - protein, 16 aa, synthetic construct
VRHGNFGNSYVSWFAY

SEQ ID NO: 1464 - protein, 125 aa, synthetic construct; identical to SEQ ID NO: 1084

SEQ ID NO: 1465 - DNA, 375 bp, synthetic construct; identical to SEQ ID NO: 1085
  source 1..375: mol_type = other DNA

SEQ ID NO: 1466 - protein, 9 aa, synthetic construct
TGAVTTSNY

SEQ ID NO: 1467 - skipped

SEQ ID NO: 1468 - protein, 9 aa, synthetic construct
LLYYGSIWV

SEQ ID NO: 1469 - protein, 110 aa, synthetic construct
DIQMTQSPSSLSASVGDRVTITCRSSTGAVTTSNYANWVQQKPGKAPKGLIGGTNKRAPGVPARFSGSGSGTDFTLTISSLQPEDFATYYCLLYYGSIWVFGQGTKVEIK

SEQ ID NO: 1470 - DNA, 330 bp, synthetic construct
  source 1..330: mol_type = other DNA
gatattcaaatgactcaatctccttcttctttatctgcttctgttggtgatcgtgttactattacttgtcgttcttctactggtgctgttactacttctaattatgctaattgggttcaacaaaaacctggtaaagctcctaaaggtttaattggtggtactaataaacgtgctcctggtgttcctgctcgtttttctggttctggttctggtactgattttactttaactatttcttctttacaacctgaagattttgctacttattattgtttattatattatggttctatttgggtttttggtcaaggtactaaagttgaaattaaa

SEQ ID NO: 1471 - protein, 8 aa, synthetic construct
GFTFNTYA

SEQ ID NO: 1472 - protein, 10 aa, synthetic construct
IRSKYNNYAT

SEQ ID NO: 1473 - protein, 16 aa, synthetic construct
VRHGNFGNSYVSWFAY

SEQ ID NO: 1474 - protein, 125 aa, synthetic construct; identical to SEQ ID NO: 1084

SEQ ID NO: 1475 - DNA, 375 bp, synthetic construct; identical to SEQ ID NO: 1085
  source 1..375: mol_type = other DNA

SEQ ID NO: 1476 - protein, 9 aa, synthetic construct
TGAVTTSNY

SEQ ID NO: 1477 - skipped

SEQ ID NO: 1478 - protein, 9 aa, synthetic construct
AIWYDNIWV

SEQ ID NO: 1479 - protein, 110 aa, synthetic construct
DIQMTQSPSSLSASVGDRVTITCRSSTGAVTTSNYANWVQQKPGKAPKGLIGGTNKRAPGVPARFSGSGSGTDFTLTISSLQPEDFATYYCAIWYDNIWVFGQGTKVEIK

SEQ ID NO: 1480 - DNA, 330 bp, synthetic construct
  source 1..330: mol_type = other DNA
gatattcaaatgactcaatctccttcttctttatctgcttctgttggtgatcgtgttactattacttgtcgttcttctactggtgctgttactacttctaattatgctaattgggttcaacaaaaacctggtaaagctcctaaaggtttaattggtggtactaataaacgtgctcctggtgttcctgctcgtttttctggttctggttctggtactgattttactttaactatttcttctttacaacctgaagattttgctacttattattgtgctatttggtatgataatatttgggtttttggtcaaggtactaaagttgaaattaaa

SEQ ID NO: 1481 - protein, 8 aa, synthetic construct
GFTFNTYA

SEQ ID NO: 1482 - protein, 10 aa, synthetic construct
IRSKYNNYAT

SEQ ID NO: 1483 - protein, 16 aa, synthetic construct
VRHGNFGNSYVSWFAY

SEQ ID NO: 1484 - protein, 125 aa, synthetic construct; identical to SEQ ID NO: 1084

SEQ ID NO: 1485 - DNA, 375 bp, synthetic construct; identical to SEQ ID NO: 1085
  source 1..375: mol_type = other DNA

SEQ ID NO: 1486 - protein, 9 aa, synthetic construct
TGAVTTSNY

SEQ ID NO: 1487 - skipped

SEQ ID NO: 1488 - protein, 9 aa, synthetic construct
LSWHSSSWV

SEQ ID NO: 1489 - protein, 110 aa, synthetic construct
DIQMTQSPSSLSASVGDRVTITCRSSTGAVTTSNYANWVQQKPGKAPKGLIGGTNKRAPGVPARFSGSGSGTDFTLTISSLQPEDFATYYCLSWHSSSWVFGQGTKVEIK

SEQ ID NO: 1490 - DNA, 330 bp, synthetic construct
  source 1..330: mol_type = other DNA
gatattcaaatgactcaatctccttcttctttatctgcttctgttggtgatcgtgttactattacttgtcgttcttctactggtgctgttactacttctaattatgctaattgggttcaacaaaaacctggtaaagctcctaaaggtttaattggtggtactaataaacgtgctcctggtgttcctgctcgtttttctggttctggttctggtactgattttactttaactatttcttctttacaacctgaagattttgctacttattattgtttatcttggcattcttcttcttgggtttttggtcaaggtactaaagttgaaattaaa

SEQ ID NO: 1491 - protein, 8 aa, synthetic construct
GFTFNTYA

SEQ ID NO: 1492 - protein, 10 aa, synthetic construct
IRSKYNNYAT

SEQ ID NO: 1493 - protein, 16 aa, synthetic construct
VRHGNFGNSYVSWFAY

SEQ ID NO: 1494 - protein, 125 aa, synthetic construct; identical to SEQ ID NO: 1084

SEQ ID NO: 1495 - DNA, 375 bp, synthetic construct; identical to SEQ ID NO: 1085
  source 1..375: mol_type = other DNA

SEQ ID NO: 1496 - protein, 9 aa, synthetic construct
TGAVTTSNY

SEQ ID NO: 1497 - skipped

SEQ ID NO: 1498 - protein, 9 aa, synthetic construct
LIWQTSAWV

SEQ ID NO: 1499 - protein, 110 aa, synthetic construct
DIQMTQSPSSLSASVGDRVTITCRSSTGAVTTSNYANWVQQKPGKAPKGLIGGTNKRAPGVPARFSGSGSGTDFTLTISSLQPEDFATYYCLIWQTSAWVFGQGTKVEIK

SEQ ID NO: 1500 - DNA, 330 bp, synthetic construct
  source 1..330: mol_type = other DNA
gatattcaaatgactcaatctccttcttctttatctgcttctgttggtgatcgtgttactattacttgtcgttcttctactggtgctgttactacttctaattatgctaattgggttcaacaaaaacctggtaaagctcctaaaggtttaattggtggtactaataaacgtgctcctggtgttcctgctcgtttttctggttctggttctggtactgattttactttaactatttcttctttacaacctgaagattttgctacttattattgtttaatttggcaaacttctgcttgggtttttggtcaaggtactaaagttgaaattaaa

SEQ ID NO: 1501 - protein, 8 aa, synthetic construct
DFTFETYA

SEQ ID NO: 1502 - protein, 10 aa, synthetic construct
IRSKYNNYAT

SEQ ID NO: 1503 - protein, 16 aa, synthetic construct
VRHGNFGNSYVSWFAY

SEQ ID NO: 1504 - protein, 125 aa, synthetic construct; identical to SEQ ID NO: 704

SEQ ID NO: 1505 - DNA, 375 bp, synthetic construct; identical to SEQ ID NO: 705
  source 1..375: mol_type = other DNA

SEQ ID NO: 1506 - protein, 9 aa, synthetic construct
TGAVTPSNY

SEQ ID NO: 1507 - skipped

SEQ ID NO: 1508 - protein, 9 aa, synthetic construct
ALWYSNLWV

SEQ ID NO: 1509 - protein, 110 aa, synthetic construct; identical to SEQ ID NO: 1139

SEQ ID NO: 1510 - DNA, 330 bp, synthetic construct; identical to SEQ ID NO: 1140
  source 1..330: mol_type = other DNA

SEQ ID NO: 1511 - protein, 8 aa, synthetic construct
DFTFETYA

SEQ ID NO: 1512 - protein, 10 aa, synthetic construct
IRSKYNNYAT

SEQ ID NO: 1513 - protein, 16 aa, synthetic construct
VRHGNFGNSYVSWFAY

SEQ ID NO: 1514 - protein, 125 aa, synthetic construct; identical to SEQ ID NO: 704

SEQ ID NO: 1515 - DNA, 375 bp, synthetic construct; identical to SEQ ID NO: 705
  source 1..375: mol_type = other DNA

SEQ ID NO: 1516 - protein, 9 aa, synthetic construct
TGAVTTSNY

SEQ ID NO: 1517 - skipped

SEQ ID NO: 1518 - protein, 9 aa, synthetic construct
ALWYSNLWV

SEQ ID NO: 1519 - protein, 110 aa, synthetic construct; identical to SEQ ID NO: 1179

SEQ ID NO: 1520 - DNA, 330 bp, synthetic construct; identical to SEQ ID NO: 1180
  source 1..330: mol_type = other DNA

SEQ ID NO: 1521 - protein, 8 aa, synthetic construct
DFTFETYA

SEQ ID NO: 1522 - protein, 10 aa, synthetic construct
IRSKYNNYAT

SEQ ID NO: 1523 - protein, 16 aa, synthetic construct
VRHGNFGNSYVSWFAY

SEQ ID NO: 1524 - protein, 125 aa, synthetic construct; identical to SEQ ID NO: 704

SEQ ID NO: 1525 - DNA, 375 bp, synthetic construct; identical to SEQ ID NO: 705
  source 1..375: mol_type = other DNA

SEQ ID NO: 1526 - protein, 9 aa, synthetic construct
TGAVTTSNY

SEQ ID NO: 1527 - skipped

SEQ ID NO: 1528 - protein, 9 aa, synthetic construct
VIWHNLAWV

SEQ ID NO: 1529 - protein, 110 aa, synthetic construct; identical to SEQ ID NO: 1339

SEQ ID NO: 1530 - DNA, 330 bp, synthetic construct; identical to SEQ ID NO: 1340
  source 1..330: mol_type = other DNA

SEQ ID NO: 1531 - protein, 8 aa, synthetic construct
EFTFETYA

SEQ ID NO: 1532 - protein, 10 aa, synthetic construct
IRSKYNNYAT

SEQ ID NO: 1533 - protein, 16 aa, synthetic construct
VRHGNFGNSYVSWFAY

SEQ ID NO: 1534 - protein, 125 aa, synthetic construct; identical to SEQ ID NO: 764

SEQ ID NO: 1535 - DNA, 375 bp, synthetic construct; identical to SEQ ID NO: 765
  source 1..375: mol_type = other DNA

SEQ ID NO: 1536 - protein, 9 aa, synthetic construct
TGAVPTSNY

SEQ ID NO: 1537 - skipped

SEQ ID NO: 1538 - protein, 9 aa, synthetic construct
ALWYSNLWV

SEQ ID NO: 1539 - protein, 110 aa, synthetic construct; identical to SEQ ID NO: 1119

SEQ ID NO: 1540 - DNA, 330 bp, synthetic construct; identical to SEQ ID NO: 1120
  source 1..330: mol_type = other DNA

SEQ ID NO: 1541 - protein, 8 aa, synthetic construct
GFAFNAYA

SEQ ID NO: 1542 - protein, 10 aa, synthetic construct
IRSKYNNYAT

SEQ ID NO: 1543 - protein, 16 aa, synthetic construct
VRHGNFGNSYVSWFAY

SEQ ID NO: 1544 - protein, 125 aa, synthetic construct; identical to SEQ ID NO: 694

SEQ ID NO: 1545 - DNA, 375 bp, synthetic construct; identical to SEQ ID NO: 695
  source 1..375: mol_type = other DNA

SEQ ID NO: 1546 - protein, 9 aa, synthetic construct
TGAVPTSLY

SEQ ID NO: 1547 - skipped

SEQ ID NO: 1548 - protein, 9 aa, synthetic construct
ALWYSNLWV

SEQ ID NO: 1549 - protein, 110 aa, synthetic construct; identical to SEQ ID NO: 1129

SEQ ID NO: 1550 - DNA, 330 bp, synthetic construct; identical to SEQ ID NO: 1130
  source 1..330: mol_type = other DNA

SEQ ID NO: 1551 - protein, 8 aa, synthetic construct
GFAFNAYA

SEQ ID NO: 1552 - protein, 10 aa, synthetic construct
IRSKYNNYAT

SEQ ID NO: 1553 - protein, 16 aa, synthetic construct
VRHGNFGNSYVSWFAY

SEQ ID NO: 1554 - protein, 125 aa, synthetic construct; identical to SEQ ID NO: 694

SEQ ID NO: 1555 - DNA, 375 bp, synthetic construct; identical to SEQ ID NO: 695
  source 1..375: mol_type = other DNA

SEQ ID NO: 1556 - protein, 9 aa, synthetic construct
TGAVPTSNY

SEQ ID NO: 1557 - skipped

SEQ ID NO: 1558 - protein, 9 aa, synthetic construct
ALWYSNLWV

SEQ ID NO: 1559 - protein, 110 aa, synthetic construct; identical to SEQ ID NO: 1119

SEQ ID NO: 1560 - DNA, 330 bp, synthetic construct; identical to SEQ ID NO: 1120
  source 1..330: mol_type = other DNA

SEQ ID NO: 1561 - protein, 8 aa, synthetic construct
GFAFNAYA

SEQ ID NO: 1562 - protein, 10 aa, synthetic construct
IRSKYNNYAT

SEQ ID NO: 1563 - protein, 16 aa, synthetic construct
VRHGNFGNSYVSWFAY

SEQ ID NO: 1564 - protein, 125 aa, synthetic construct; identical to SEQ ID NO: 694

SEQ ID NO: 1565 - DNA, 375 bp, synthetic construct; identical to SEQ ID NO: 695
  source 1..375: mol_type = other DNA

SEQ ID NO: 1566 - protein, 9 aa, synthetic construct
TGAVTTSNY

SEQ ID NO: 1567 - skipped

SEQ ID NO: 1568 - protein, 9 aa, synthetic construct
LSWHSSSWV

SEQ ID NO: 1569 - protein, 110 aa, synthetic construct; identical to SEQ ID NO: 1489

SEQ ID NO: 1570 - DNA, 330 bp, synthetic construct; identical to SEQ ID NO: 1490
  source 1..330: mol_type = other DNA

SEQ ID NO: 1571 - protein, 8 aa, synthetic construct
GFAFNAYA

SEQ ID NO: 1572 - protein, 10 aa, synthetic construct
IRSKYNNYAT

SEQ ID NO: 1573 - protein, 16 aa, synthetic construct
VRHGNFGNSYVSWFAY

SEQ ID NO: 1574 - protein, 125 aa, synthetic construct; identical to SEQ ID NO: 694

SEQ ID NO: 1575 - DNA, 375 bp, synthetic construct; identical to SEQ ID NO: 695
  source 1..375: mol_type = other DNA

SEQ ID NO: 1576 - protein, 9 aa, synthetic construct
TGAVTTSNY

SEQ ID NO: 1577 - skipped

SEQ ID NO: 1578 - protein, 9 aa, synthetic construct
VIWHNLAWV

SEQ ID NO: 1579 - protein, 110 aa, synthetic construct; identical to SEQ ID NO: 1339

SEQ ID NO: 1580 - DNA, 330 bp, synthetic construct; identical to SEQ ID NO: 1340
  source 1..330: mol_type = other DNA

SEQ ID NO: 1581 - protein, 8 aa, synthetic construct
GFDFNAYA

SEQ ID NO: 1582 - protein, 10 aa, synthetic construct
IRSKYNNYAT

SEQ ID NO: 1583 - protein, 16 aa, synthetic construct
VRHGNFGNSYVSWFAY

SEQ ID NO: 1584 - protein, 125 aa, synthetic construct; identical to SEQ ID NO: 724

SEQ ID NO: 1585 - DNA, 375 bp, synthetic construct; identical to SEQ ID NO: 725
  source 1..375: mol_type = other DNA

SEQ ID NO: 1586 - protein, 9 aa, synthetic construct
GGSVTTHNY

SEQ ID NO: 1587 - skipped

SEQ ID NO: 1588 - protein, 9 aa, synthetic construct
ALWYSNLWV

SEQ ID NO: 1589 - protein, 110 aa, synthetic construct; identical to SEQ ID NO: 1149

SEQ ID NO: 1590 - DNA, 330 bp, synthetic construct; identical to SEQ ID NO: 1150
  source 1..330: mol_type = other DNA

SEQ ID NO: 1591 - protein, 8 aa, synthetic construct
GFDFNAYA

SEQ ID NO: 1592 - protein, 10 aa, synthetic construct
IRSKYNNYAT

SEQ ID NO: 1593 - protein, 16 aa, synthetic construct
VRHGNFGNSYVSWFAY

SEQ ID NO: 1594 - protein, 125 aa, synthetic construct; identical to SEQ ID NO: 724

SEQ ID NO: 1595 - DNA, 375 bp, synthetic construct; identical to SEQ ID NO: 725
  source 1..375: mol_type = other DNA

SEQ ID NO: 1596 - protein, 9 aa, synthetic construct
TGAVTTSNY

SEQ ID NO: 1597 - skipped

SEQ ID NO: 1598 - protein, 9 aa, synthetic construct
AAWHDNAWV

SEQ ID NO: 1599 - protein, 110 aa, synthetic construct; identical to SEQ ID NO: 1439

SEQ ID NO: 1600 - DNA, 330 bp, synthetic construct; identical to SEQ ID NO: 1440
  source 1..330: mol_type = other DNA

SEQ ID NO: 1601 - protein, 8 aa, synthetic construct
GFGFNAYA

SEQ ID NO: 1602 - protein, 10 aa, synthetic construct
IRSKYNNYAT

SEQ ID NO: 1603 - protein, 16 aa, synthetic construct
VRHGNFGNSYVSWFAY

SEQ ID NO: 1604 - protein, 125 aa, synthetic construct; identical to SEQ ID NO: 674

SEQ ID NO: 1605 - DNA, 375 bp, synthetic construct; identical to SEQ ID NO: 675
  source 1..375: mol_type = other DNA

SEQ ID NO: 1606 - protein, 9 aa, synthetic construct
TGAVTTSNY

SEQ ID NO: 1607 - skipped

SEQ ID NO: 1608 - protein, 9 aa, synthetic construct
VIWHGSVWV

SEQ ID NO: 1609 - protein, 110 aa, synthetic construct; identical to SEQ ID NO: 1299

SEQ ID NO: 1610 - DNA, 330 bp, synthetic construct; identical to SEQ ID NO: 1300
  source 1..330: mol_type = other DNA

SEQ ID NO: 1611 - protein, 8 aa, synthetic construct
GFGFNAYA

SEQ ID NO: 1612 - protein, 10 aa, synthetic construct
IRSKYNNYAT

SEQ ID NO: 1613 - protein, 16 aa, synthetic construct
VRHGNFGNSYVSWFAY

SEQ ID NO: 1614 - protein, 125 aa, synthetic construct; identical to SEQ ID NO: 674

SEQ ID NO: 1615 - DNA, 375 bp, synthetic construct; identical to SEQ ID NO: 675
  source 1..375: mol_type = other DNA

SEQ ID NO: 1616 - protein, 9 aa, synthetic construct
TGAVTTSNY

SEQ ID NO: 1617 - skipped

SEQ ID NO: 1618 - protein, 9 aa, synthetic construct
VIWHNLAWV

SEQ ID NO: 1619 - protein, 110 aa, synthetic construct; identical to SEQ ID NO: 1339

SEQ ID NO: 1620 - DNA, 330 bp, synthetic construct; identical to SEQ ID NO: 1340
  source 1..330: mol_type = other DNA

SEQ ID NO: 1621 - protein, 8 aa, synthetic construct
GFGFNAYA

SEQ ID NO: 1622 - protein, 10 aa, synthetic construct
IRSKYNNYAT

SEQ ID NO: 1623 - protein, 16 aa, synthetic construct
VRHGNFGNSYVSWFAY

SEQ ID NO: 1624 - protein, 125 aa, synthetic construct; identical to SEQ ID NO: 674

SEQ ID NO: 1625 - DNA, 375 bp, synthetic construct; identical to SEQ ID NO: 675
  source 1..375: mol_type = other DNA

SEQ ID NO: 1626 - protein, 9 aa, synthetic construct
TGAVTTSNY

SEQ ID NO: 1627 - skipped

SEQ ID NO: 1628 - protein, 9 aa, synthetic construct
VIWHSGAWV

SEQ ID NO: 1629 - protein, 110 aa, synthetic construct; identical to SEQ ID NO: 1259

SEQ ID NO: 1630 - DNA, 330 bp, synthetic construct; identical to SEQ ID NO: 1260
  source 1..330: mol_type = other DNA

SEQ ID NO: 1631 - protein, 8 aa, synthetic construct
GFSFVTYA

SEQ ID NO: 1632 - protein, 10 aa, synthetic construct
IRSKYNNYAT

SEQ ID NO: 1633 - protein, 16 aa, synthetic construct
VRHGNFGNSYVSWFAY

SEQ ID NO: 1634 - protein, 125 aa, synthetic construct; identical to SEQ ID NO: 754

SEQ ID NO: 1635 - DNA, 375 bp, synthetic construct; identical to SEQ ID NO: 755
  source 1..375: mol_type = other DNA

SEQ ID NO: 1636 - protein, 9 aa, synthetic construct
TGAVPTSNY

SEQ ID NO: 1637 - skipped

SEQ ID NO: 1638 - protein, 9 aa, synthetic construct
ALWYSNLWV

SEQ ID NO: 1639 - protein, 110 aa, synthetic construct; identical to SEQ ID NO: 1119

SEQ ID NO: 1640 - DNA, 330 bp, synthetic construct; identical to SEQ ID NO: 1120
  source 1..330: mol_type = other DNA

SEQ ID NO: 1641 - protein, 8 aa, synthetic construct
GFSFVTYA

SEQ ID NO: 1642 - protein, 10 aa, synthetic construct
IRSKYNNYAT

SEQ ID NO: 1643 - protein, 16 aa, synthetic construct
VRHGNFGNSYVSWFAY

SEQ ID NO: 1644 - protein, 125 aa, synthetic construct; identical to SEQ ID NO: 754

SEQ ID NO: 1645 - DNA, 375 bp, synthetic construct; identical to SEQ ID NO: 755
  source 1..375: mol_type = other DNA

SEQ ID NO: 1646 - protein, 9 aa, synthetic construct
TGAVTTSNY

SEQ ID NO: 1647 - skipped

SEQ ID NO: 1648 - protein, 9 aa, synthetic construct
ALWYSNLWV

SEQ ID NO: 1649 - protein, 110 aa, synthetic construct; identical to SEQ ID NO: 1179

SEQ ID NO: 1650 - DNA, 330 bp, synthetic construct; identical to SEQ ID NO: 1180
  source 1..330: mol_type = other DNA

SEQ ID NO: 1651 - protein, 8 aa, synthetic construct
GFTFETYA

SEQ ID NO: 1652 - protein, 10 aa, synthetic construct
IRSKYNNYAT

SEQ ID NO: 1653 - protein, 16 aa, synthetic construct
VRHGNFGNSYVSWFAY

SEQ ID NO: 1654 - protein, 125 aa, synthetic construct; identical to SEQ ID NO: 744

SEQ ID NO: 1655 - DNA, 375 bp, synthetic construct; identical to SEQ ID NO: 745
  source 1..375: mol_type = other DNA

SEQ ID NO: 1656 - protein, 9 aa, synthetic construct
TGAVTTSNY

SEQ ID NO: 1657 - skipped

SEQ ID NO: 1658 - protein, 9 aa, synthetic construct
VIWHSGAWV

SEQ ID NO: 1659 - protein, 110 aa, synthetic construct; identical to SEQ ID NO: 1259

SEQ ID NO: 1660 - DNA, 330 bp, synthetic construct; identical to SEQ ID NO: 1260
  source 1..330: mol_type = other DNA

SEQ ID NO: 1661 - protein, 8 aa, synthetic construct
GFTFETYA

SEQ ID NO: 1662 - protein, 10 aa, synthetic construct
IRSKYTNYAT

SEQ ID NO: 1663 - protein, 16 aa, synthetic construct
VRHGNFGNSYVSWFAY

SEQ ID NO: 1664 - protein, 125 aa, synthetic construct
EVQLVESGGGLVQPGGSLRLSCAASGFTFETYAMNWVRQAPGKGLEWVGRIRSKYTNYATYYADSVKGRFTISRDDSKNTLYLQMNSLRAEDTAVYYCVRHGNFGNSYVSWFAYWGQGTLVTVSS

SEQ ID NO: 1665 - DNA, 375 bp, synthetic construct
  source 1..375: mol_type = other DNA
gaagttcaattagttgaatctggtggtggtttagttcaacctggtggttctttacgtttatcttgtgctgcttctggttttacttttgaaacttatgctatgaattgggttcgtcaagctcctggtaaaggtttagaatgggttggtcgtattcgttctaaatatactaattatgctacttattatgctgattctgttaaaggtcgttttactatttctcgtgatgattctaaaaatactttatatttacaaatgaattctttacgtgctgaagatactgctgtttattattgtgttcgtcatggtaattttggtaattcttatgtttcttggtttgcttattggggtcaaggtactttagttactgtttcttct

SEQ ID NO: 1666 - protein, 9 aa, synthetic construct
TGAVTTSTY

SEQ ID NO: 1667 - skipped

SEQ ID NO: 1668 - protein, 9 aa, synthetic construct
ALWYSNLWV

SEQ ID NO: 1669 - protein, 110 aa, synthetic construct; identical to SEQ ID NO: 1099

SEQ ID NO: 1670 - DNA, 330 bp, synthetic construct; identical to SEQ ID NO: 1100
  source 1..330: mol_type = other DNA

SEQ ID NO: 1671 - protein, 8 aa, synthetic construct
GFTFNTYA

SEQ ID NO: 1672 - protein, 10 aa, synthetic construct
IKTKHDNYAT

SEQ ID NO: 1673 - protein, 16 aa, synthetic construct
VRHGNFGNSYVSWFAY

SEQ ID NO: 1674 - protein, 125 aa, synthetic construct; identical to SEQ ID NO: 854

SEQ ID NO: 1675 - DNA, 375 bp, synthetic construct; identical to SEQ ID NO: 855
  source 1..375: mol_type = other DNA

SEQ ID NO: 1676 - protein, 9 aa, synthetic construct
TGAVTTSNY

SEQ ID NO: 1677 - skipped

SEQ ID NO: 1678 - protein, 9 aa, synthetic construct
AAWHDNAWV

SEQ ID NO: 1679 - protein, 110 aa, synthetic construct; identical to SEQ ID NO: 1439

SEQ ID NO: 1680 - DNA, 330 bp, synthetic construct; identical to SEQ ID NO: 1440
  source 1..330: mol_type = other DNA

SEQ ID NO: 1681 - protein, 8 aa, synthetic construct
GFTFNTYA

SEQ ID NO: 1682 - protein, 10 aa, synthetic construct
IKTKHDNYAT

SEQ ID NO: 1683 - protein, 16 aa, synthetic construct
VRHGNFGNSYVSWFAY

SEQ ID NO: 1684 - protein, 125 aa, synthetic construct; identical to SEQ ID NO: 854

SEQ ID NO: 1685 - DNA, 375 bp, synthetic construct; identical to SEQ ID NO: 855
  source 1..375: mol_type = other DNA

SEQ ID NO: 1686 - protein, 9 aa, synthetic construct
TGAVTTSNY

SEQ ID NO: 1687 - skipped

SEQ ID NO: 1688 - protein, 9 aa, synthetic construct
LIWQTSAWV

SEQ ID NO: 1689 - protein, 110 aa, synthetic construct; identical to SEQ ID NO: 1499

SEQ ID NO: 1690 - DNA, 330 bp, synthetic construct; identical to SEQ ID NO: 1500
  source 1..330: mol_type = other DNA

SEQ ID NO: 1691 - protein, 8 aa, synthetic construct
GFTFNTYA

SEQ ID NO: 1692 - protein, 10 aa, synthetic construct
IRSKHNNYET

SEQ ID NO: 1693 - protein, 16 aa, synthetic construct
VRHGNFGNSYVSWFAY

SEQ ID NO: 1694 - protein, 125 aa, synthetic construct; identical to SEQ ID NO: 884

SEQ ID NO: 1695 - DNA, 375 bp, synthetic construct; identical to SEQ ID NO: 885
  source 1..375: mol_type = other DNA

SEQ ID NO: 1696 - protein, 9 aa, synthetic construct
TGAVSTNYY

SEQ ID NO: 1697 - skipped

SEQ ID NO: 1698 - protein, 9 aa, synthetic construct
ALWYSNLWV

SEQ ID NO: 1699 - protein, 110 aa, synthetic construct; identical to SEQ ID NO: 1109

SEQ ID NO: 1700 - DNA, 330 bp, synthetic construct; identical to SEQ ID NO: 1110
  source 1..330: mol_type = other DNA

SEQ ID NO: 1701 - protein, 8 aa, synthetic construct
GFTFNTYA

SEQ ID NO: 1702 - protein, 10 aa, synthetic construct
IRSKHNNYET

SEQ ID NO: 1703 - protein, 16 aa, synthetic construct
VRHGNFGNSYVSWFAY

SEQ ID NO: 1704 - protein, 125 aa, synthetic construct; identical to SEQ ID NO: 884

SEQ ID NO: 1705 - DNA, 375 bp, synthetic construct; identical to SEQ ID NO: 885
  source 1..375: mol_type = other DNA

SEQ ID NO: 1706 - protein, 9 aa, synthetic construct
TGAVTTSTY

SEQ ID NO: 1707 - skipped

SEQ ID NO: 1708 - protein, 9 aa, synthetic construct
ALWYSNLWV

SEQ ID NO: 1709 - protein, 110 aa, synthetic construct; identical to SEQ ID NO: 1099

SEQ ID NO: 1710 - DNA, 330 bp, synthetic construct; identical to SEQ ID NO: 1100
  source 1..330: mol_type = other DNA

SEQ ID NO: 1711 - protein, 8 aa, synthetic construct
GFTFNTYA

SEQ ID NO: 1712 - protein, 10 aa, synthetic construct
IRSKNFNYAT

SEQ ID NO: 1713 - protein, 16 aa, synthetic construct
VRHGNFGNSYVSWFAY

SEQ ID NO: 1714 - protein, 125 aa, synthetic construct; identical to SEQ ID NO: 864

SEQ ID NO: 1715 - DNA, 375 bp, synthetic construct; identical to SEQ ID NO: 865
  source 1..375: mol_type = other DNA

SEQ ID NO: 1716 - protein, 9 aa, synthetic construct
TGAVTTSNY

SEQ ID NO: 1717 - skipped

SEQ ID NO: 1718 - protein, 9 aa, synthetic construct
VIWHNLAWV

SEQ ID NO: 1719 - protein, 110 aa, synthetic construct; identical to SEQ ID NO: 1339

SEQ ID NO: 1720 - DNA, 330 bp, synthetic construct; identical to SEQ ID NO: 1340
  source 1..330: mol_type = other DNA

SEQ ID NO: 1721 - protein, 8 aa, synthetic construct
GFTFNTYA

SEQ ID NO: 1722 - protein, 10 aa, synthetic construct
IRSKNFNYAT

SEQ ID NO: 1723 - protein, 16 aa, synthetic construct
VRHGNFGNSYVSWFAY

SEQ ID NO: 1724 - protein, 125 aa, synthetic construct; identical to SEQ ID NO: 864

SEQ ID NO: 1725 - DNA, 375 bp, synthetic construct; identical to SEQ ID NO: 865
  source 1..375: mol_type = other DNA

SEQ ID NO: 1726 - protein, 9 aa, synthetic construct
TGAVTTSTY

SEQ ID NO: 1727 - skipped

SEQ ID NO: 1728 - protein, 9 aa, synthetic construct
ALWYSNLWV

SEQ ID NO: 1729 - protein, 110 aa, synthetic construct; identical to SEQ ID NO: 1099

SEQ ID NO: 1730 - DNA, 330 bp, synthetic construct; identical to SEQ ID NO: 1100
  source 1..330: mol_type = other DNA

SEQ ID NO: 1731 - protein, 8 aa, synthetic construct
GFTFNTYA

SEQ ID NO: 1732 - protein, 10 aa, synthetic construct
IRSKPNEYAT

SEQ ID NO: 1733 - protein, 16 aa, synthetic construct
VRHGNFGNSYVSWFAY

SEQ ID NO: 1734 - protein, 125 aa, synthetic construct; identical to SEQ ID NO: 934

SEQ ID NO: 1735 - DNA, 375 bp, synthetic construct; identical to SEQ ID NO: 935
  source 1..375: mol_type = other DNA

SEQ ID NO: 1736 - protein, 9 aa, synthetic construct
TGAVPTSNY

SEQ ID NO: 1737 - skipped

SEQ ID NO: 1738 - protein, 9 aa, synthetic construct
ALWYSNLWV

SEQ ID NO: 1739 - protein, 110 aa, synthetic construct; identical to SEQ ID NO: 1119

SEQ ID NO: 1740 - DNA, 330 bp, synthetic construct; identical to SEQ ID NO: 1120
  source 1..330: mol_type = other DNA

SEQ ID NO: 1741 - protein, 8 aa, synthetic construct
GFTFNTYA

SEQ ID NO: 1742 - protein, 10 aa, synthetic construct
IRSKRSNYAT

SEQ ID NO: 1743 - protein, 16 aa, synthetic construct
VRHGNFGNSYVSWFAY

SEQ ID NO: 1744 - protein, 125 aa, synthetic construct; identical to SEQ ID NO: 824

SEQ ID NO: 1745 - DNA, 375 bp, synthetic construct; identical to SEQ ID NO: 825
  source 1..375: mol_type = other DNA

SEQ ID NO: 1746 - protein, 9 aa, synthetic construct
TGAVPTSNY

SEQ ID NO: 1747 - skipped

SEQ ID NO: 1748 - protein, 9 aa, synthetic construct
ALWYSNLWV

SEQ ID NO: 1749 - protein, 110 aa, synthetic construct; identical to SEQ ID NO: 1119

SEQ ID NO: 1750 - DNA, 330 bp, synthetic construct; identical to SEQ ID NO: 1120
  source 1..330: mol_type = other DNA

SEQ ID NO: 1751 - protein, 8 aa, synthetic construct
GFTFNTYA

SEQ ID NO: 1752 - protein, 10 aa, synthetic construct
IRSKRSNYAT

SEQ ID NO: 1753 - protein, 16 aa, synthetic construct
VRHGNFGNSYVSWFAY

SEQ ID NO: 1754 - protein, 125 aa, synthetic construct; identical to SEQ ID NO: 824

SEQ ID NO: 1755 - DNA, 375 bp, synthetic construct; identical to SEQ ID NO: 825
  source 1..375: mol_type = other DNA

SEQ ID NO: 1756 - protein, 9 aa, synthetic construct
TGAVTTSNY

SEQ ID NO: 1757 - skipped

SEQ ID NO: 1758 - protein, 9 aa, synthetic construct
AAWHDNAWV

SEQ ID NO: 1759 - protein, 110 aa, synthetic construct; identical to SEQ ID NO: 1439

SEQ ID NO: 1760 - DNA, 330 bp, synthetic construct; identical to SEQ ID NO: 1440
  source 1..330: mol_type = other DNA

SEQ ID NO: 1761 - protein, 8 aa, synthetic construct
GFTFNTYA

SEQ ID NO: 1762 - protein, 10 aa, synthetic construct
IRSKVNNYAT

SEQ ID NO: 1763 - protein, 16 aa, synthetic construct
VRHGNFGNSYVSWFAY

SEQ ID NO: 1764 - protein, 125 aa, synthetic construct; identical to SEQ ID NO: 984

SEQ ID NO: 1765 - DNA, 375 bp, synthetic construct; identical to SEQ ID NO: 985
  source 1..375: mol_type = other DNA

SEQ ID NO: 1766 - protein, 9 aa, synthetic construct
TGAVPTSNY

SEQ ID NO: 1767 - skipped

SEQ ID NO: 1768 - protein, 9 aa, synthetic construct
ALWYSNLWV

SEQ ID NO: 1769 - protein, 110 aa, synthetic construct; identical to SEQ ID NO: 1119

SEQ ID NO: 1770 - DNA, 330 bp, synthetic construct; identical to SEQ ID NO: 1120
  source 1..330: mol_type = other DNA

SEQ ID NO: 1771 - protein, 8 aa, synthetic construct
GFTFNTYA

SEQ ID NO: 1772 - protein, 10 aa, synthetic construct
IRSKVNNYAT

SEQ ID NO: 1773 - protein, 16 aa, synthetic construct
VRHGNFGNSYVSWFAY

SEQ ID NO: 1774 - protein, 125 aa, synthetic construct; identical to SEQ ID NO: 984

SEQ ID NO: 1775 - DNA, 375 bp, synthetic construct; identical to SEQ ID NO: 985
  source 1..375: mol_type = other DNA

SEQ ID NO: 1776 - protein, 9 aa, synthetic construct
TGAVTPSNY

SEQ ID NO: 1777 - skipped

SEQ ID NO: 1778 - protein, 9 aa, synthetic construct
ALWYSNLWV

SEQ ID NO: 1779 - protein, 110 aa, synthetic construct; identical to SEQ ID NO: 1139

SEQ ID NO: 1780 - DNA, 330 bp, synthetic construct; identical to SEQ ID NO: 1140
  source 1..330: mol_type = other DNA

SEQ ID NO: 1781 - protein, 8 aa, synthetic construct
GFTFNTYA

SEQ ID NO: 1782 - protein, 10 aa, synthetic construct
IRSKYNKYAT

SEQ ID NO: 1783 - protein, 16 aa, synthetic construct
VRHGNFGNSYVSWFAY

SEQ ID NO: 1784 - protein, 125 aa, synthetic construct; identical to SEQ ID NO: 1004

SEQ ID NO: 1785 - DNA, 375 bp, synthetic construct; identical to SEQ ID NO: 1005
  source 1..375: mol_type = other DNA

SEQ ID NO: 1786 - protein, 9 aa, synthetic construct
TGAVTTSNY

SEQ ID NO: 1787 - skipped

SEQ ID NO: 1788 - protein, 9 aa, synthetic construct
VIWHNLAWV

SEQ ID NO: 1789 - protein, 110 aa, synthetic construct; identical to SEQ ID NO: 1339

SEQ ID NO: 1790 - DNA, 330 bp, synthetic construct; identical to SEQ ID NO: 1340
  source 1..330: mol_type = other DNA

SEQ ID NO: 1791 - protein, 8 aa, synthetic construct
GFTFNTYA

SEQ ID NO: 1792 - protein, 10 aa, synthetic construct
IRSKYNKYAT

SEQ ID NO: 1793 - protein, 16 aa, synthetic construct
VRHGNFGNSYVSWFAY

SEQ ID NO: 1794 - protein, 125 aa, synthetic construct; identical to SEQ ID NO: 1004

SEQ ID NO: 1795 - DNA, 375 bp, synthetic construct; identical to SEQ ID NO: 1005
  source 1..375: mol_type = other DNA

SEQ ID NO: 1796 - protein, 9 aa, synthetic construct
TGAVTTSTY

SEQ ID NO: 1797 - skipped

SEQ ID NO: 1798 - protein, 9 aa, synthetic construct
ALWYSNLWV

SEQ ID NO: 1799 - protein, 110 aa, synthetic construct; identical to SEQ ID NO: 1099

SEQ ID NO: 1800 - DNA, 330 bp, synthetic construct; identical to SEQ ID NO: 1100
  source 1..330: mol_type = other DNA

SEQ ID NO: 1801 - protein, 8 aa, synthetic construct
GFTFNTYA

SEQ ID NO: 1802 - protein, 10 aa, synthetic construct
IRSKYNNYAT

SEQ ID NO: 1803 - protein, 16 aa, synthetic construct
ARHGEYSSGWPYYFAY

SEQ ID NO: 1804 - protein, 125 aa, synthetic construct; identical to SEQ ID NO: 1054

SEQ ID NO: 1805 - DNA, 375 bp, synthetic construct; identical to SEQ ID NO: 1055
  source 1..375: mol_type = other DNA

SEQ ID NO: 1806 - protein, 9 aa, synthetic construct
TGAVTTSNY

SEQ ID NO: 1807 - skipped

SEQ ID NO: 1808 - protein, 9 aa, synthetic construct
LIWYGSAWV

SEQ ID NO: 1809 - protein, 110 aa, synthetic construct; identical to SEQ ID NO: 1419

SEQ ID NO: 1810 - DNA, 330 bp, synthetic construct; identical to SEQ ID NO: 1420
  source 1..330: mol_type = other DNA

SEQ ID NO: 1811 - protein, 8 aa, synthetic construct
GFTFNTYA

SEQ ID NO: 1812 - protein, 10 aa, synthetic construct
IRSKYNNYAT

SEQ ID NO: 1813 - protein, 16 aa, synthetic construct
VREGIGGTSYRGNFAY

SEQ ID NO: 1814 - protein, 125 aa, synthetic construct; identical to SEQ ID NO: 1074

SEQ ID NO: 1815 - DNA, 375 bp, synthetic construct; identical to SEQ ID NO: 1075
  source 1..375: mol_type = other DNA

SEQ ID NO: 1816 - protein, 9 aa, synthetic construct
TGAVPTSNY

SEQ ID NO: 1817 - skipped

SEQ ID NO: 1818 - protein, 9 aa, synthetic construct
ALWYSNLWV

SEQ ID NO: 1819 - protein, 110 aa, synthetic construct; identical to SEQ ID NO: 1119

SEQ ID NO: 1820 - DNA, 330 bp, synthetic construct; identical to SEQ ID NO: 1120
  source 1..330: mol_type = other DNA

SEQ ID NO: 1821 - protein, 8 aa, synthetic construct
GFTFNTYA

SEQ ID NO: 1822 - protein, 10 aa, synthetic construct
IRSKYNNYAT

SEQ ID NO: 1823 - protein, 16 aa, synthetic construct
VREGIGGTSYRGNFAY

SEQ ID NO: 1824 - protein, 125 aa, synthetic construct; identical to SEQ ID NO: 1074

SEQ ID NO: 1825 - DNA, 375 bp, synthetic construct; identical to SEQ ID NO: 1075
  source 1..375: mol_type = other DNA

SEQ ID NO: 1826 - protein, 9 aa, synthetic construct
TGAVTTSNY

SEQ ID NO: 1827 - skipped

SEQ ID NO: 1828 - protein, 9 aa, synthetic construct
LIWYNNIWV

SEQ ID NO: 1829 - protein, 110 aa, synthetic construct; identical to SEQ ID NO: 1399

SEQ ID NO: 1830 - DNA, 330 bp, synthetic construct; identical to SEQ ID NO: 1400
  source 1..330: mol_type = other DNA

SEQ ID NO: 1831 - protein, 8 aa, synthetic construct
GFTFNTYA

SEQ ID NO: 1832 - protein, 10 aa, synthetic construct
IRSKYNNYAT

SEQ ID NO: 1833 - protein, 16 aa, synthetic construct
VRHGNFGNVGTSYFAY

SEQ ID NO: 1834 - protein, 125 aa, synthetic construct; identical to SEQ ID NO: 1064

SEQ ID NO: 1835 - DNA, 375 bp, synthetic construct; identical to SEQ ID NO: 1065
  source 1..375: mol_type = other DNA

SEQ ID NO: 1836 - protein, 9 aa, synthetic construct
TGAVTPSNY

SEQ ID NO: 1837 - skipped

SEQ ID NO: 1838 - protein, 9 aa, synthetic construct
ALWYSNLWV

SEQ ID NO: 1839 - protein, 110 aa, synthetic construct; identical to SEQ ID NO: 1139

SEQ ID NO: 1840 - DNA, 330 bp, synthetic construct; identical to SEQ ID NO: 1140
  source 1..330: mol_type = other DNA

SEQ ID NO: 1841 - protein, 8 aa, synthetic construct
GFTFNTYA

SEQ ID NO: 1842 - protein, 10 aa, synthetic construct
IRSKYNNYAT

SEQ ID NO: 1843 - protein, 16 aa, synthetic construct
VRHGNFGNVGTSYFAY

SEQ ID NO: 1844 - protein, 125 aa, synthetic construct; identical to SEQ ID NO: 1064

SEQ ID NO: 1845 - DNA, 375 bp, synthetic construct; identical to SEQ ID NO: 1065
  source 1..375: mol_type = other DNA

SEQ ID NO: 1846 - protein, 9 aa, synthetic construct
TGAVTTSNY

SEQ ID NO: 1847 - skipped

SEQ ID NO: 1848 - protein, 9 aa, synthetic construct
AAWHDNAWV

SEQ ID NO: 1849 - protein, 110 aa, synthetic construct; identical to SEQ ID NO: 1439

SEQ ID NO: 1850 - DNA, 330 bp, synthetic construct; identical to SEQ ID NO: 1440
  source 1..330: mol_type = other DNA

SEQ ID NO: 1851 - protein, 8 aa, synthetic construct
GFTFNTYA

SEQ ID NO: 1852 - protein, 10 aa, synthetic construct
IRSKYTNYAT

SEQ ID NO: 1853 - protein, 16 aa, synthetic construct
VRHGNFGNSYVSWFAY

SEQ ID NO: 1854 - protein, 125 aa, synthetic construct; identical to SEQ ID NO: 954

SEQ ID NO: 1855 - DNA, 375 bp, synthetic construct; identical to SEQ ID NO: 955
  source 1..375: mol_type = other DNA

SEQ ID NO: 1856 - protein, 9 aa, synthetic construct
TGAVTTSNY

SEQ ID NO: 1857 - skipped

SEQ ID NO: 1858 - protein, 9 aa, synthetic construct
VIWHNLAWV

SEQ ID NO: 1859 - protein, 110 aa, synthetic construct; identical to SEQ ID NO: 1339

SEQ ID NO: 1860 - DNA, 330 bp, synthetic construct; identical to SEQ ID NO: 1340
  source 1..330: mol_type = other DNA

SEQ ID NO: 1861 - protein, 8 aa, synthetic construct
GFTFNTYA

SEQ ID NO: 1862 - protein, 10 aa, synthetic construct
IRSQYNNYAT

SEQ ID NO: 1863 - protein, 16 aa, synthetic construct
VRHGNFGNSYVSWFAY

SEQ ID NO: 1864 - protein, 125 aa, synthetic construct; identical to SEQ ID NO: 964

SEQ ID NO: 1865 - DNA, 375 bp, synthetic construct; identical to SEQ ID NO: 965
  source 1..375: mol_type = other DNA

SEQ ID NO: 1866 - protein, 9 aa, synthetic construct
TGAVSTNYY

SEQ ID NO: 1867 - skipped

SEQ ID NO: 1868 - protein, 9 aa, synthetic construct
ALWYSNLWV

SEQ ID NO: 1869 - protein, 110 aa, synthetic construct; identical to SEQ ID NO: 1109

SEQ ID NO: 1870 - DNA, 330 bp, synthetic construct; identical to SEQ ID NO: 1110
  source 1..330: mol_type = other DNA

SEQ ID NO: 1871 - protein, 8 aa, synthetic construct
GFTFNTYA

SEQ ID NO: 1872 - protein, 10 aa, synthetic construct
IRSSNNNYAT

SEQ ID NO: 1873 - protein, 16 aa, synthetic construct
VRHGNFGNSYVSWFAY

SEQ ID NO: 1874 - protein, 125 aa, synthetic construct; identical to SEQ ID NO: 994

SEQ ID NO: 1875 - DNA, 375 bp, synthetic construct; identical to SEQ ID NO: 995
  source 1..375: mol_type = other DNA

SEQ ID NO: 1876 - protein, 9 aa, synthetic construct
LGSVTTFNY

SEQ ID NO: 1877 - skipped

SEQ ID NO: 1878 - protein, 9 aa, synthetic construct
ALWYSNLWV

SEQ ID NO: 1879 - protein, 110 aa, synthetic construct; identical to SEQ ID NO: 1169

SEQ ID NO: 1880 - DNA, 330 bp, synthetic construct; identical to SEQ ID NO: 1170
  source 1..330: mol_type = other DNA

SEQ ID NO: 1881 - protein, 8 aa, synthetic construct
GFTFNTYA

SEQ ID NO: 1882 - protein, 10 aa, synthetic construct
IRSSNNNYAT

SEQ ID NO: 1883 - protein, 16 aa, synthetic construct
VRHGNFGNSYVSWFAY

SEQ ID NO: 1884 - protein, 125 aa, synthetic construct; identical to SEQ ID NO: 994

SEQ ID NO: 1885 - DNA, 375 bp, synthetic construct; identical to SEQ ID NO: 995
  source 1..375: mol_type = other DNA

SEQ ID NO: 1886 - protein, 9 aa, synthetic construct
TGAVTTSTY

SEQ ID NO: 1887 - skipped

SEQ ID NO: 1888 - protein, 9 aa, synthetic construct
ALWYSNLWV

SEQ ID NO: 1889 - protein, 110 aa, synthetic construct; identical to SEQ ID NO: 1099

SEQ ID NO: 1890 - DNA, 330 bp, synthetic construct; identical to SEQ ID NO: 1100
  source 1..330: mol_type = other DNA

SEQ ID NO: 1891 - protein, 8 aa, synthetic construct
RFTFETYA

SEQ ID NO: 1892 - protein, 10 aa, synthetic construct
IRSKYNNYAT

SEQ ID NO: 1893 - protein, 16 aa, synthetic construct
VRHGNFGNSYVSWFAY

SEQ ID NO: 1894 - protein, 125 aa, synthetic construct; identical to SEQ ID NO: 684

SEQ ID NO: 1895 - DNA, 375 bp, synthetic construct; identical to SEQ ID NO: 685
  source 1..375: mol_type = other DNA

SEQ ID NO: 1896 - protein, 9 aa, synthetic construct
TGAVSTNYY

SEQ ID NO: 1897 - skipped

SEQ ID NO: 1898 - protein, 9 aa, synthetic construct
ALWYSNLWV

SEQ ID NO: 1899 - protein, 110 aa, synthetic construct; identical to SEQ ID NO: 1109

SEQ ID NO: 1900 - DNA, 330 bp, synthetic construct; identical to SEQ ID NO: 1110
  source 1..330: mol_type = other DNA

SEQ ID NO: 1901 - protein, 8 aa, synthetic construct
RFTFETYA

SEQ ID NO: 1902 - protein, 10 aa, synthetic construct
IRSKYNNYAT

SEQ ID NO: 1903 - protein, 16 aa, synthetic construct
VRHGNFGNSYVSWFAY

SEQ ID NO: 1904 - protein, 125 aa, synthetic construct; identical to SEQ ID NO: 684

SEQ ID NO: 1905 - DNA, 375 bp, synthetic construct; identical to SEQ ID NO: 685
  source 1..375: mol_type = other DNA

SEQ ID NO: 1906 - protein, 9 aa, synthetic construct
TGAVTTSTY

SEQ ID NO: 1907 - skipped

SEQ ID NO: 1908 - protein, 9 aa, synthetic construct
ALWYSNLWV

SEQ ID NO: 1909 - protein, 110 aa, synthetic construct; identical to SEQ ID NO: 1099

SEQ ID NO: 1910 - DNA, 330 bp, synthetic construct; identical to SEQ ID NO: 1100
  source 1..330: mol_type = other DNA

SEQ ID NO: 1911 - protein, 9 aa, synthetic construct
GYSISSGYS

SEQ ID NO: 1912 - protein, 7 aa, synthetic construct
IHYSGST

SEQ ID NO: 1913 - protein, 15 aa, synthetic construct
ARETGYYGTSYAMDY

SEQ ID NO: 1914 - protein, 122 aa, synthetic construct
QVQLQESGPGLVKPSETLSLTCTVSGYSISSGYSWHWIRQPPGKGLEWIGYIHYSGSTNYNPSLKSRVTISVDTSKNQFSLKLSSVTAADTAVYYCARETGYYGTSYAMDYWGQGTLVTVSS

SEQ ID NO: 1915 - DNA, 366 bp, synthetic construct
  source 1..366: mol_type = other DNA
caagttcaattacaagaatctggtcctggtttagttaaaccttctgaaactttatctttaacttgtactgtttctggttattctatttcttctggttattcttggcattggattcgtcaacctcctggtaaaggtttagaatggattggttatattcattattctggttctactaattataatccttctttaaaatctcgtgttactatttctgttgatacttctaaaaatcaattttctttaaaattatcttctgttactgctgctgatactgctgtttattattgtgctcgtgaaactggttattatggtacttcttatgctatggattattggggtcaaggtactttagttactgtttcttct

SEQ ID NO: 1916 - protein, 11 aa, synthetic construct
QSLVHSNGNTY

SEQ ID NO: 1917 - skipped

SEQ ID NO: 1918 - protein, 9 aa, synthetic construct
SQNTHVPRT

SEQ ID NO: 1919 - protein, 112 aa, synthetic construct
DIQMTQSPSSLSASVGDRVTITCRSSQSLVHSNGNTYLHWYQQKPGQPPKLLIYKVSNRFSGVPDRFSGSGSGTDFTLTISSLQAEDVAVYYCSQNTHVPRTFGQGTKLEIK

SEQ ID NO: 1920 - DNA, 336 bp, synthetic construct
  source 1..336: mol_type = other DNA
gatattcaaatgactcaatctccttcttctttatctgcttctgttggtgatcgtgttactattacttgtcgttcttctcaatctttagttcattctaatggtaatacttatttacattggtatcaacaaaaacctggtcaacctcctaaattattaatttataaagtttctaatcgtttttctggtgttcctgatcgtttttctggttctggttctggtactgattttactttaactatttcttctttacaagctgaagatgttgctgtttattattgttctcaaaatactcatgttcctcgtacttttggtcaaggtactaaattagaaattaaa

SEQ ID NO: 1921 - protein, 8 aa, synthetic construct
GFTFSNYW

SEQ ID NO: 1922 - protein, 10 aa, synthetic construct
IRLKSDNHAT

SEQ ID NO: 1923 - protein, 7 aa, synthetic construct
TVPATDN

SEQ ID NO: 1924 - protein, 116 aa, synthetic construct
EVQLEEFGGGLVQPGGSMKLSCIASGFTFSNYWMSWVRQSPEKGLEWVAEIRLKSDNHATHYAESVKGRFIISRDDSKSRLYLQMNILRAEDTGIYYCTVPATDNWGQGTSVTVSS

SEQ ID NO: 1925 - DNA, 348 bp, synthetic construct
  source 1..348: mol_type = other DNA
gaagttcaattagaagaatttggtggtggtttagttcaacctggtggttctatgaaattatcttgtattgcttctggttttactttttctaattattggatgtcttgggttcgtcaatctcctgaaaaaggtttagaatgggttgctgaaattcgtttaaaatctgataatcatgctactcattatgctgaatctgttaaaggtcgttttattatttctcgtgatgattctaaatctcgtttatatttacaaatgaatattttacgtgctgaagatactggtatttattattgtactgttcctgctactgataattggggtcaaggtacttctgttactgtttcttct

SEQ ID NO: 1926 - protein, 6 aa, synthetic construct
QNVRAA

SEQ ID NO: 1927 - skipped

SEQ ID NO: 1928 - protein, 9 aa, synthetic construct
LQHWNYPWT

SEQ ID NO: 1929 - protein, 107 aa, synthetic construct
DIVLTQSQKFMSTSVGDRVNITCKASQNVRAAVAWYQQKPGQSPKGLIFLASNRHTRVPDRFTGSGSGTDFTLSISNVQSEDLADYFCLQHWNYPWTFGGGTKLEIK

SEQ ID NO: 1930 - DNA, 321 bp, synthetic construct
  source 1..321: mol_type = other DNA
gatattgttttaactcaatctcaaaaatttatgtctacttctgttggtgatcgtgttaatattacttgtaaagcttctcaaaatgttcgtgctgctgttgcttggtatcaacaaaaacctggtcaatctcctaaaggtttaatttttttagcttctaatcgtcatactcgtgttcctgatcgttttactggttctggttctggtactgattttactttatctatttctaatgttcaatctgaagatttagctgattatttttgtttacaacattggaattatccttggacttttggtggtggtactaaattagaaattaaa

SEQ ID NO: 1931 - protein, 8 aa, synthetic construct
GYTLTRYW

SEQ ID NO: 1932 - protein, 8 aa, synthetic construct
IYPGDGDT

SEQ ID NO: 1933 - protein, 10 aa, synthetic construct
ASWGYDGFDY

SEQ ID NO: 1934 - protein, 117 aa, synthetic construct
EVQLQQFGAELARPGASVKLSCKASGYTLTRYWMQWVKQRPGQGLEWIGAIYPGDGDTRYTQKFKDKATLTADKSSSIAYMKLSSLASEDSAVYYCASWGYDGFDYWGQGTTLTVSS

SEQ ID NO: 1935 - DNA, 351 bp, synthetic construct
  source 1..351: mol_type = other DNA
gaagttcaattacaacaatttggtgctgaattagctcgtcctggtgcttctgttaaattatcttgtaaagcttctggttatactttaactcgttattggatgcaatgggttaaacaacgtcctggtcaaggtttagaatggattggtgctatttatcctggtgatggtgatactcgttatactcaaaaatttaaagataaagctactttaactgctgataaatcttcttctattgcttatatgaaattatcttctttagcttctgaagattctgctgtttattattgtgcttcttggggttatgatggttttgattattggggtcaaggtactactttaactgtttcttct

SEQ ID NO: 1936 - protein, 11 aa, synthetic construct
KSLLHSNGNTY

SEQ ID NO: 1937 - skipped

SEQ ID NO: 1938 - protein, 9 aa, synthetic construct
MQHLEYPFT

SEQ ID NO: 1939 - protein, 112 aa, synthetic construct
DIVMTQAAPSVPVTPGESVSISCRSSKSLLHSNGNTYLYWFLQRPGQSPQLLIYRMSNLASGVPDRFSGSGSGTAFTLRISRVEAEDVGVYYCMQHLEYPFTFGAGTKLELK

SEQ ID NO: 1940 - DNA, 336 bp, synthetic construct
  source 1..336: mol_type = other DNA
gatattgttatgactcaagctgctccttctgttcctgttactcctggtgaatctgtttctatttcttgtcgttcttctaaatctttattacattctaatggtaatacttatttatattggtttttacaacgtcctggtcaatctcctcaattattaatttatcgtatgtctaatttagcttctggtgttcctgatcgtttttctggttctggttctggtactgcttttactttacgtatttctcgtgttgaagctgaagatgttggtgtttattattgtatgcaacatttagaatatccttttacttttggtgctggtactaaattagaattaaaa

SEQ ID NO: 1941 - protein, 8 aa, synthetic construct
GYTFTSYD

SEQ ID NO: 1942 - protein, 8 aa, synthetic construct
IFPGDGTS

SEQ ID NO: 1943 - protein, 7 aa, synthetic construct
ARRLGSH

SEQ ID NO: 1944 - protein, 114 aa, synthetic construct
EVQLVQSGAEVKKPGASVKLSCKASGYTFTSYDINWVRQAPGQGLEWIGWIFPGDGTSKYAQKFQGRATLTTDKSTSTAYMELSSLRSEDTAVYYCARRLGSHWGQGTTLTVSS

SEQ ID NO: 1945 - DNA, 342 bp, synthetic construct
  source 1..342: mol_type = other DNA
gaagttcaattagttcaatctggtgctgaagttaaaaaacctggtgcttctgttaaattatcttgtaaagcttctggttatacttttacttcttatgatattaattgggttcgtcaagctcctggtcaaggtttagaatggattggttggatttttcctggtgatggtacttctaaatatgctcaaaaatttcaaggtcgtgctactttaactactgataaatctacttctactgcttatatggaattatcttctttacgttctgaagatactgctgtttattattgtgctcgtcgtttaggttctcattggggtcaaggtactactttaactgtttcttct

SEQ ID NO: 1946 - protein, 8 aa, synthetic construct
GFTFSSYA

SEQ ID NO: 1947 - protein, 8 aa, synthetic construct
ISSGGGYT

SEQ ID NO: 1948 - protein, 10 aa, synthetic construct
ARGFITIFDY

SEQ ID NO: 1949 - protein, 117 aa, synthetic construct; identical to SEQ ID NO: 634

SEQ ID NO: 1950 - DNA, 351 bp, synthetic construct; identical to SEQ ID NO: 635
  source 1..351: mol_type = other DNA

SEQ ID NO: 1951 - protein, 8 aa, synthetic construct
GFNIKDTY

SEQ ID NO: 1952 - protein, 8 aa, synthetic construct
IDPENGDT

SEQ ID NO: 1953 - protein, 12 aa, synthetic construct
KDYGNYERYFDV

SEQ ID NO: 1954 - protein, 119 aa, synthetic construct
EVRLQQSGAELVKPGASVKLSCTASGFNIKDTYMHWVKQRPEQGLEWIGWIDPENGDTEYAPKFQGKATMTADTSSNIAYLHLSGLTSEDTAVYYCKDYGNYERYFDVWGAGTTVTVSS

SEQ ID NO: 1955 - DNA, 357 bp, synthetic construct
  source 1..357: mol_type = other DNA
gaagttcgtttacaacaatctggtgctgaattagttaaacctggtgcttctgttaaattatcttgtactgcttctggttttaatattaaagatacttatatgcattgggttaaacaacgtcctgaacaaggtttagaatggattggttggattgatcctgaaaatggtgatactgaatatgctcctaaatttcaaggtaaagctactatgactgctgatacttcttctaatattgcttatttacatttatctggtttaacttctgaagatactgctgtttattattgtaaagattatggtaattatgaacgttattttgatgtttggggtgctggtactactgttactgtttcttct

SEQ ID NO: 1956 - protein, 8 aa, synthetic construct
GFAFSAYD

SEQ ID NO: 1957 - protein, 8 aa, synthetic construct
INSGGSYT

SEQ ID NO: 1958 - protein, 6 aa, synthetic construct
ARNVAY

SEQ ID NO: 1959 - protein, 113 aa, synthetic construct
DVKLVESGGGLVKPGGSLKLSCAASGFAFSAYDMSWFRQTPEKRLEWVATINSGGSYTYYPDSVKGRFTISRDNARNTLYLQMSSLRSEDSALYYCARNVAYWGQGTLVTVSS

SEQ ID NO: 1960 - DNA, 339 bp, synthetic construct
  source 1..339: mol_type = other DNA
gatgttaaattagttgaatctggtggtggtttagttaaacctggtggttctttaaaattatcttgtgctgcttctggttttgctttttctgcttatgatatgtcttggtttcgtcaaactcctgaaaaacgtttagaatgggttgctactattaattctggtggttcttatacttattatcctgattctgttaaaggtcgttttactatttctcgtgataatgctcgtaatactttatatttacaaatgtcttctttacgttctgaagattctgctttatattattgtgctcgtaatgttgcttattggggtcaaggtactttagttactgtttcttct

SEQ ID NO: 1961 - protein, 8 aa, synthetic construct
GFPFGNYL

SEQ ID NO: 1962 - protein, 8 aa, synthetic construct
ISGGGVST

SEQ ID NO: 1963 - protein, 12 aa, synthetic construct
ARGPSTWPAFDV

SEQ ID NO: 1964 - protein, 119 aa, synthetic construct
EVQLLESGGGLVQPGGSLRLSCAASGFPFGNYLMNWVRQAPGKGLEWVSVISGGGVSTYYADSVKGRFTISRDNSKNTLYLQMNSLRAEDTAVYYCARGPSTWPAFDVWGQGTLVTVSS

SEQ ID NO: 1965 - DNA, 357 bp, synthetic construct
  source 1..357: mol_type = other DNA
gaagttcaattattagaatctggtggtggtttagttcaacctggtggttctttacgtttatcttgtgctgcttctggttttccttttggtaattatttaatgaattgggttcgtcaagctcctggtaaaggtttagaatgggtttctgttatttctggtggtggtgtttctacttattatgctgattctgttaaaggtcgttttactatttctcgtgataattctaaaaatactttatatttacaaatgaattctttacgtgctgaagatactgctgtttattattgtgctcgtggtccttctacttggcctgcttttgatgtttggggtcaaggtactttagttactgtttcttct

SEQ ID NO: 1966 - protein, 8 aa, synthetic construct
GYTFTSYW

SEQ ID NO: 1967 - protein, 8 aa, synthetic construct
IDPYDSET

SEQ ID NO: 1968 - protein, 9 aa, synthetic construct
TRSGMDFDY

SEQ ID NO: 1969 - protein, 116 aa, synthetic construct
EVQLQQPGAELVRPGASVKLSCKASGYTFTSYWMHWVKQRPGQGLEWIGRIDPYDSETHYNQKFKDKAILTVDTSSSTGYMQLSSLTYEDSAVYYCTRSGMDFDYWGQGTTVTVSS

SEQ ID NO: 1970 - DNA, 348 bp, synthetic construct
  source 1..348: mol_type = other DNA
gaagttcaattacaacaacctggtgctgaattagttcgtcctggtgcttctgttaaattatcttgtaaagcttctggttatacttttacttcttattggatgcattgggttaaacaacgtcctggtcaaggtttagaatggattggtcgtattgatccttatgattctgaaactcattataatcaaaaatttaaagataaagctattttaactgttgatacttcttcttctactggttatatgcaattatcttctttaacttatgaagattctgctgtttattattgtactcgttctggtatggattttgattattggggtcaaggtactactgttactgtttcttct

SEQ ID NO: 1971 - protein, 8 aa, synthetic construct
GFTFSNYA

SEQ ID NO: 1972 - protein, 7 aa, synthetic construct
ISSGGST

SEQ ID NO: 1973 - protein, 9 aa, synthetic construct
TRDLAWFPY

SEQ ID NO: 1974 - protein, 115 aa, synthetic construct
EVKLVESGGGLVKPGGSLKLSCAASGFTFSNYAMSWVRQTPEKRLEWVASISSGGSTYYPDSVKGRFTISRDNARNILYLQMSSLRSEDTAMYCCTRDLAWFPYWGQGTLVTVSA

SEQ ID NO: 1975 - DNA, 345 bp, synthetic construct
  source 1..345: mol_type = other DNA
gaagttaaattagttgaatctggtggtggtttagttaaacctggtggttctttaaaattatcttgtgctgcttctggttttactttttctaattatgctatgtcttgggttcgtcaaactcctgaaaaacgtttagaatgggttgcttctatttcttctggtggttctacttattatcctgattctgttaaaggtcgttttactatttctcgtgataatgctcgtaatattttatatttacaaatgtcttctttacgttctgaagatactgctatgtattgttgtactcgtgatttagcttggtttccttattggggtcaaggtactttagttactgtttctgct

SEQ ID NO: 1976 - protein, 8 aa, synthetic construct
GFTFSSYA

SEQ ID NO: 1977 - protein, 8 aa, synthetic construct
ISSGGSYT

SEQ ID NO: 1978 - protein, 11 aa, synthetic construct
ASPYGYAWFAY

SEQ ID NO: 1979 - protein, 118 aa, synthetic construct
EVMLVESGGGLVKPGGSLKLSCAASGFTFSSYAMSWVRQTPEKRLEWVATISSGGSYTYYPDSVKGRFTISRDNAKNTLYLQMISLRSEDTAMYYCASPYGYAWFAYWGQGTLVTVSA

SEQ ID NO: 1980 - DNA, 354 bp, synthetic construct
  source 1..354: mol_type = other DNA
gaagttatgttagttgaatctggtggtggtttagttaaacctggtggttctttaaaattatcttgtgctgcttctggttttactttttcttcttatgctatgtcttgggttcgtcaaactcctgaaaaacgtttagaatgggttgctactatttcttctggtggttcttatacttattatcctgattctgttaaaggtcgttttactatttctcgtgataatgctaaaaatactttatatttacaaatgatttctttacgttctgaagatactgctatgtattattgtgcttctccttatggttatgcttggtttgcttattggggtcaaggtactttagttactgtttctgct

SEQ ID NO: 1981 - protein, 8 aa, synthetic construct
GFTFTDYY

SEQ ID NO: 1982 - protein, 10 aa, synthetic construct
IRNKANGYTT

SEQ ID NO: 1983 - protein, 13 aa, synthetic construct
ARDRGWLRGYFDV

SEQ ID NO: 1984 - protein, 122 aa, synthetic construct; identical to SEQ ID NO: 594

SEQ ID NO: 1985 - DNA, 366 bp, synthetic construct; identical to SEQ ID NO: 595
  source 1..366: mol_type = other DNA

SEQ ID NO: 1986 - protein, 8 aa, synthetic construct
GFNIKDTY

SEQ ID NO: 1987 - protein, 8 aa, synthetic construct
IDPANGNT

SEQ ID NO: 1988 - protein, 7 aa, synthetic construct
NAYGYDY

SEQ ID NO: 1989 - protein, 114 aa, synthetic construct
EVKIEESGAELVKPGASVKLSCTASGFNIKDTYMHWVKQRPEQGLEWIGRIDPANGNTKYDPKFQGKATITADTSSNTTYLQLSSLTSEDTAVYYCNAYGYDYWGQGSTLTVSS

SEQ ID NO: 1990 - DNA, 342 bp, synthetic construct
  source 1..342: mol_type = other DNA
gaagttaaaattgaagaatctggtgctgaattagttaaacctggtgcttctgttaaattatcttgtactgcttctggttttaatattaaagatacttatatgcattgggttaaacaacgtcctgaacaaggtttagaatggattggtcgtattgatcctgctaatggtaatactaaatatgatcctaaatttcaaggtaaagctactattactgctgatacttcttctaatactacttatttacaattatcttctttaacttctgaagatactgctgtttattattgtaatgcttatggttatgattattggggtcaaggttctactttaactgtttcttct

SEQ ID NO: 1991 - protein, 8 aa, synthetic construct
GFTFTDYY

SEQ ID NO: 1992 - protein, 10 aa, synthetic construct
IRNKANGYTT

SEQ ID NO: 1993 - protein, 13 aa, synthetic construct
ARDDGNYGTGFAY

SEQ ID NO: 1994 - protein, 122 aa, synthetic construct
EVKLVESGGGLVQPGTSLRLSCATSGFTFTDYYMSWVRQPPGKALEWLGFIRNKANGYTTEYSASVKGRFTISRDNSQSILYLQMNTLRAEDSATYYCARDDGNYGTGFAYWGQGTLVTVSA

SEQ ID NO: 1995 - DNA, 366 bp, synthetic construct
  source 1..366: mol_type = other DNA
gaagttaaattagttgaatctggtggtggtttagttcaacctggtacttctttacgtttatcttgtgctacttctggttttacttttactgattattatatgtcttgggttcgtcaacctcctggtaaagctttagaatggttaggttttattcgtaataaagctaatggttatactactgaatattctgcttctgttaaaggtcgttttactatttctcgtgataattctcaatctattttatatttacaaatgaatactttacgtgctgaagattctgctacttattattgtgctcgtgatgatggtaattatggtactggttttgcttattggggtcaaggtactttagttactgtttctgct

SEQ ID NO: 1996 - protein, 8 aa, synthetic construct
GFTFTYYY

SEQ ID NO: 1997 - protein, 10 aa, synthetic construct
IRNKANGDTT

SEQ ID NO: 1998 - protein, 14 aa, synthetic construct
ARDGGLRRGYYFDY

SEQ ID NO: 1999 - protein, 123 aa, synthetic construct
DVQLVESGGGLVQPGDSLRLSCATSGFTFTYYYMSWVRQPPGKALEWLGFIRNKANGDTTEYSASVKGRFTISRDNSQSILYLQMNTLTGEDSATYYCARDGGLRRGYYFDYWGQGTTLTVSS

SEQ ID NO: 2000 - DNA, 369 bp, synthetic construct
  source 1..369: mol_type = other DNA
gatgttcaattagttgaatctggtggtggtttagttcaacctggtgattctttacgtttatcttgtgctacttctggttttacttttacttattattatatgtcttgggttcgtcaacctcctggtaaagctttagaatggttaggttttattcgtaataaagctaatggtgatactactgaatattctgcttctgttaaaggtcgttttactatttctcgtgataattctcaatctattttatatttacaaatgaatactttaactggtgaagattctgctacttattattgtgctcgtgatggtggtttacgtcgtggttattattttgattattggggtcaaggtactactttaactgtttcttct

SEQ ID NO: 2001 - protein, 8 aa, synthetic construct
GYTFTNYG

SEQ ID NO: 2002 - protein, 8 aa, synthetic construct
IHPSDSET

SEQ ID NO: 2003 - protein, 11 aa, synthetic construct
ARWGYDVGSDY

SEQ ID NO: 2004 - protein, 118 aa, synthetic construct
EVKLVESGPELKKPGETVKISCKASGYTFTNYGMNWVKQRPGQGLEWIGMIHPSDSETRLNQKFKDKATLTVDKSSSTAYMQVSSLASEDSAVYYCARWGYDVGSDYWGQGTTLTVSS

SEQ ID NO: 2005 - DNA, 354 bp, synthetic construct
  source 1..354: mol_type = other DNA
gaagttaaattagttgaatctggtcctgaattaaaaaaacctggtgaaactgttaaaatttcttgtaaagcttctggttatacttttactaattatggtatgaattgggttaaacaacgtcctggtcaaggtttagaatggattggtatgattcatccttctgattctgaaactcgtttaaatcaaaaatttaaagataaagctactttaactgttgataaatcttcttctactgcttatatgcaagtttcttctttagcttctgaagattctgctgtttattattgtgctcgttggggttatgatgttggttctgattattggggtcaaggtactactttaactgtttcttct

SEQ ID NO: 2006 - protein, 8 aa, synthetic construct
GFTFTDYY

SEQ ID NO: 2007 - protein, 10 aa, synthetic construct
IRNRPNFYTT

SEQ ID NO: 2008 - protein, 11 aa, synthetic construct
VRDHWGWYFDV

SEQ ID NO: 2009 - protein, 120 aa, synthetic construct
EVKLVESGGGLVQPGGSLRLSCATSGFTFTDYYMSWVRQPPGKALQWLAFIRNRPNFYTTEYSASVKGRFTISRDNSQSILYLQMNTLRAEDSATYYCVRDHWGWYFDVWGAGTTVTVSS

SEQ ID NO: 2010 - DNA, 360 bp, synthetic construct
  source 1..360: mol_type = other DNA
gaagttaaattagttgaatctggtggtggtttagttcaacctggtggttctttacgtttatcttgtgctacttctggttttacttttactgattattatatgtcttgggttcgtcaacctcctggtaaagctttacaatggttagcttttattcgtaatcgtcctaatttttatactactgaatattctgcttctgttaaaggtcgttttactatttctcgtgataattctcaatctattttatatttacaaatgaatactttacgtgctgaagattctgctacttattattgtgttcgtgatcattggggttggtattttgatgtttggggtgctggtactactgttactgtttcttct

SEQ ID NO: 2011 - protein, 8 aa, synthetic construct
GYTFTDYS

SEQ ID NO: 2012 - protein, 8 aa, synthetic construct
INTETGEP

SEQ ID NO: 2013 - protein, 7 aa, synthetic construct
AGLLFDY

SEQ ID NO: 2014 - protein, 114 aa, synthetic construct
QIQLAQSGPELKKPGETVKISCKASGYTFTDYSIHWVKQAPGKGLKWMGWINTETGEPTYADDFKGRFDFSLETSASTAYLQINNLKNEDTATYFCAGLLFDYWGQGTTLTVSS

SEQ ID NO: 2015 - DNA, 342 bp, synthetic construct
  source 1..342: mol_type = other DNA
caaattcaattagctcaatctggtcctgaattaaaaaaacctggtgaaactgttaaaatttcttgtaaagcttctggttatacttttactgattattctattcattgggttaaacaagctcctggtaaaggtttaaaatggatgggttggattaatactgaaactggtgaacctacttatgctgatgattttaaaggtcgttttgatttttctttagaaacttctgcttctactgcttatttacaaattaataatttaaaaaatgaagatactgctacttatttttgtgctggtttattatttgattattggggtcaaggtactactttaactgtttcttct

SEQ ID NO: 2016 - protein, 8 aa, synthetic construct
GFPFGNYL

SEQ ID NO: 2017 - protein, 8 aa, synthetic construct
ISGGGVST

SEQ ID NO: 2018 - protein, 11 aa, synthetic construct
ARGPSSPAFDV

SEQ ID NO: 2019 - protein, 118 aa, synthetic construct
EVQLLESGGGLVQPGGSLRLSCAASGFPFGNYLMNWVRQAPGKGLEWVSVISGGGVSTYYADSVKGRFTISRDNSKNTLYLQMNSLRAEDTAVYYCARGPSSPAFDVWGQGTLVTVSS

SEQ ID NO: 2020 - DNA, 354 bp, synthetic construct
  source 1..354: mol_type = other DNA
gaagttcaattattagaatctggtggtggtttagttcaacctggtggttctttacgtttatcttgtgctgcttctggttttccttttggtaattatttaatgaattgggttcgtcaagctcctggtaaaggtttagaatgggtttctgttatttctggtggtggtgtttctacttattatgctgattctgttaaaggtcgttttactatttctcgtgataattctaaaaatactttatatttacaaatgaattctttacgtgctgaagatactgctgtttattattgtgctcgtggtccttcttctcctgcttttgatgtttggggtcaaggtactttagttactgtttcttct

SEQ ID NO: 2021 - protein, 8 aa, synthetic construct
GFNIKDYY

SEQ ID NO: 2022 - protein, 8 aa, synthetic construct
IDPENGDT

SEQ ID NO: 2023 - protein, 6 aa, synthetic construct
NTGFDY

SEQ ID NO: 2024 - protein, 113 aa, synthetic construct; identical to SEQ ID NO: 444

SEQ ID NO: 2025 - DNA, 339 bp, synthetic construct
  source 1..339: mol_type = other DNA
caagcttatttacaacaatctggtgctgaattagttcgttctggtgcttctgttaaattatcttgtactgcttctggttttaatattaaagattattatatgcattgggttaaacaacgtcctgaacaaggtttagaatggattggttggattgatcctgaaaatggtgatactgaatatgctcctaaatttcaaggtaaagctactatgactgctgatacttcttctaatactgcttatttacaattatcttctttaacttctgaagatactgctgtttattattgtaatactggttttgattattggggtcaaggtactactttaactgtttcttct

SEQ ID NO: 2026 - protein, 8 aa, synthetic construct
GFTFTDYY

SEQ ID NO: 2027 - protein, 10 aa, synthetic construct
IRNKANGYTT

SEQ ID NO: 2028 - protein, 15 aa, synthetic construct
ARNLHYYGSSYGFAY

SEQ ID NO: 2029 - protein, 124 aa, synthetic construct
EVMLVESGGGLVQPGGSLRLSCATSGFTFTDYYMSWVRQPPGKALEWLGFIRNKANGYTTEYSASVKGRITISRDNSQSILYLQMNTLRVEDSATYYCARNLHYYGSSYGFAYWGQGTLVTVSA

SEQ ID NO: 2030 - DNA, 372 bp, synthetic construct
  source 1..372: mol_type = other DNA
gaagttatgttagttgaatctggtggtggtttagttcaacctggtggttctttacgtttatcttgtgctacttctggttttacttttactgattattatatgtcttgggttcgtcaacctcctggtaaagctttagaatggttaggttttattcgtaataaagctaatggttatactactgaatattctgcttctgttaaaggtcgtattactatttctcgtgataattctcaatctattttatatttacaaatgaatactttacgtgttgaagattctgctacttattattgtgctcgtaatttacattattatggttcttcttatggttttgcttattggggtcaaggtactttagttactgtttctgct

SEQ ID NO: 2031 - protein, 8 aa, synthetic construct
GFTFTDYF

SEQ ID NO: 2032 - protein, 10 aa, synthetic construct
IRNKANGYTT

SEQ ID NO: 2033 - protein, 10 aa, synthetic construct
ASGNPAWFAY

SEQ ID NO: 2034 - protein, 119 aa, synthetic construct
EVKLVESGGGLVQPGGSLRLSCATSGFTFTDYFLNWVRQPPGKALEWLGFIRNKANGYTTDYSASVKGRFTISRDNSQSILYLQMNTLRAEDSATYYCASGNPAWFAYWGQGTLVTVSA

SEQ ID NO: 2035 - DNA, 357 bp, synthetic construct
  source 1..357: mol_type = other DNA
gaagttaaattagttgaatctggtggtggtttagttcaacctggtggttctttacgtttatcttgtgctacttctggttttacttttactgattattttttaaattgggttcgtcaacctcctggtaaagctttagaatggttaggttttattcgtaataaagctaatggttatactactgattattctgcttctgttaaaggtcgttttactatttctcgtgataattctcaatctattttatatttacaaatgaatactttacgtgctgaagattctgctacttattattgtgcttctggtaatcctgcttggtttgcttattggggtcaaggtactttagttactgtttctgct

SEQ ID NO: 2036 - protein, 8 aa, synthetic construct
GFTFTDYY

SEQ ID NO: 2037 - protein, 10 aa, synthetic construct
IRNKANGYTT

SEQ ID NO: 2038 - protein, 11 aa, synthetic construct
ARDDYDDYFAY

SEQ ID NO: 2039 - protein, 120 aa, synthetic construct; identical to SEQ ID NO: 474

SEQ ID NO: 2040 - DNA, 360 bp, synthetic construct
  source 1..360: mol_type = other DNA
gaagttttattagttgaatctggtggtggtttagttcaacctggtggttctttacgtttatcttgtgctacttctggttttacttttactgattattatatgtcttgggttcgtcaacctcctggtaaagctttagaatggttaggttttattcgtaataaagctaatggttatactactgaatattctgcttctgttaaaggtcgttttactatttctcgtgataattctcaatctattttatatttacaaatgaatactttacgtggtgaagattctgctacttattattgtgctcgtgatgattatgatgattattttgcttattggggtcaaggtactactttaactgtttcttct

SEQ ID NO: 2041 - protein, 8 aa, synthetic construct
GFPFGNYL

SEQ ID NO: 2042 - protein, 8 aa, synthetic construct
ISGGGVST

SEQ ID NO: 2043 - protein, 12 aa, synthetic construct
ARGPSSWPAFDV

SEQ ID NO: 2044 - protein, 118 aa, synthetic construct; identical to SEQ ID NO: 404

SEQ ID NO: 2045 - DNA, 354 bp, synthetic construct
  source 1..354: mol_type = other DNA
gaagttcaattattagaatctggtggtggtttagttcaacctggtggttctttacgtttatcttgtgctgcttctggttttccttttggtaattatttaatgaattgggttcgtcaagctcctggtaaaggtttagaatgggtttctgttatttctggtggtggtgtttctacttattatgctgattctgttaaaggtcgttttactatttctcgtgataattctaaaaatactttatatttacaaatgaattctttacgtgctgaagatactgctgtttattgtgctcgtggtccttcttcttggcctgcttttgatgtttggggtcaaggtactttagttactgtttcttct

SEQ ID NO: 2046 - protein, 8 aa, synthetic construct
GYTFTDYY

SEQ ID NO: 2047 - protein, 8 aa, synthetic construct
IIPKNGDS

SEQ ID NO: 2048 - protein, 7 aa, synthetic construct
ARGNEDY

SEQ ID NO: 2049 - protein, 114 aa, synthetic construct
EVHLQQSGPELVKPGASVKMSCKASGYTFTDYYMKWVKQSHGESLEWIGDIIPKNGDSFYNQKFKGKATLTVDKSSSTAYMQLNSLTSEDSAVYYCARGNEDYWGQGTTLTVSS

SEQ ID NO: 2050 - DNA, 342 bp, synthetic construct
  source 1..342: mol_type = other DNA
gaagttcatttacaacaatctggtcctgaattagttaaacctggtgcttctgttaaaatgtcttgtaaagcttctggttatacttttactgattattatatgaaatgggttaaacaatctcatggtgaatctttagaatggattggtgatattattcctaaaaatggtgattctttttataatcaaaaatttaaaggtaaagctactttaactgttgataaatcttcttctactgcttatatgcaattaaattctttaacttctgaagattctgctgtttattattgtgctcgtggtaatgaagattattggggtcaaggtactactttaactgtttcttct

SEQ ID NO: 2051 - protein, 8 aa, synthetic construct
GFTFTDYY

SEQ ID NO: 2052 - protein, 10 aa, synthetic construct
IRNKANGYTT

SEQ ID NO: 2053 - protein, 5 aa, synthetic construct
ASLDY

SEQ ID NO: 2054 - protein, 114 aa, synthetic construct
EVKLVESGGGLVQPGGSLRLSCATSGFTFTDYYMSWVRQPPGKALEWLGFIRNKANGYTTEYSASVKGRFTISRDNSQSILYLQMNTLRAEDSATYYCASLDYWGQGTTLTVSS

SEQ ID NO: 2055 - DNA, 342 bp, synthetic construct
  source 1..342: mol_type = other DNA
gaagttaaattagttgaatctggtggtggtttagttcaacctggtggttctttacgtttatcttgtgctacttctggttttacttttactgattattatatgtcttgggttcgtcaacctcctggtaaagctttagaatggttaggttttattcgtaataaagctaatggttatactactgaatattctgcttctgttaaaggtcgttttactatttctcgtgataattctcaatctattttatatttacaaatgaatactttacgtgctgaagattctgctacttattattgtgcttctttagattattggggtcaaggtactactttaactgtttcttct

SEQ ID NO: 2056 - protein, 8 aa, synthetic construct
GFTFSSFG

SEQ ID NO: 2057 - protein, 8 aa, synthetic construct
ISSGSSII

SEQ ID NO: 2058 - protein, 14 aa, synthetic construct
ARGASLTTATDFDY

SEQ ID NO: 2059 - protein, 121 aa, synthetic construct
EVKLVESGGGLVQPGGFRKLSCTASGFTFSSFGMHWVRQAPEKGLEWVAYISSGSSIIYYADTVKGRFTISRDNPKNTLFLQMTSLRSEDTAMYYCARGASLTTATDFDYWGQGTTLTVSS

SEQ ID NO: 2060 - DNA, 363 bp, synthetic construct
  source 1..363: mol_type = other DNA
gaagttaaattagttgaatctggtggtggtttagttcaacctggtggttttcgtaaattatcttgtactgcttctggttttactttttcttcttttggtatgcattgggttcgtcaagctcctgaaaaaggtttagaatgggttgcttatatttcttctggttcttctattatttattatgctgatactgttaaaggtcgttttactatttctcgtgataatcctaaaaatactttatttttacaaatgacttctttacgttctgaagatactgctatgtattattgtgctcgtggtgcttctttaactactgctactgattttgattattggggtcaaggtactactttaactgtttcttct

SEQ ID NO: 2061 - protein, 8 aa, synthetic construct
GFTFTDYF

SEQ ID NO: 2062 - protein, 10 aa, synthetic construct
IRNKANGYTT

SEQ ID NO: 2063 - protein, 15 aa, synthetic construct
ARPSYYDYNGTWFAY

SEQ ID NO: 2064 - protein, 124 aa, synthetic construct; identical to SEQ ID NO: 574

SEQ ID NO: 2065 - DNA, 372 bp, synthetic construct; identical to SEQ ID NO: 575
  source 1..372: mol_type = other DNA

SEQ ID NO: 2066 - protein, 8 aa, synthetic construct
GYTFTSYY

SEQ ID NO: 2067 - protein, 8 aa, synthetic construct
INPTNGGT

SEQ ID NO: 2068 - protein, 13 aa, synthetic construct
TRCGVPFQPYFDY

SEQ ID NO: 2069 - protein, 120 aa, synthetic construct
QVQMKESGAELVKPGASVKLSCKASGYTFTSYYMYWVKQRPGQGLEWIGEINPTNGGTTFNEKFKSKATLTVDKSSSTAYMQLSSLTSEDSAVYYCTRCGVPFQPYFDYWGQGTTLTVSS

SEQ ID NO: 2070 - DNA, 360 bp, synthetic construct
  source 1..360: mol_type = other DNA
caagttcaaatgaaagaatctggtgctgaattagttaaacctggtgcttctgttaaattatcttgtaaagcttctggttatacttttacttcttattatatgtattgggttaaacaacgtcctggtcaaggtttagaatggattggtgaaattaatcctactaatggtggtactacttttaatgaaaaatttaaatctaaagctactttaactgttgataaatcttcttctactgcttatatgcaattatcttctttaacttctgaagattctgctgtttattattgtactcgttgtggtgttccttttcaaccttattttgattattggggtcaaggtactactttaactgtttcttct

SEQ ID NO: 2071 - protein, 8 aa, synthetic construct
GFTFTGYA

SEQ ID NO: 2072 - protein, 8 aa, synthetic construct
ISSGGNYT

SEQ ID NO: 2073 - protein, 11 aa, synthetic construct
ARYLGYIPFGY

SEQ ID NO: 2074 - protein, 118 aa, synthetic construct
DVMLVESGGGSVKPGGSLKLSCAASGFTFTGYAMSWVRQTPEKRLEWVATISSGGNYTYYPDSLKGRFTISRDNAKKTLYLQMSSLRSEDTAMYYCARYLGYIPFGYWGQGTLVTVSA

SEQ ID NO: 2075 - DNA, 354 bp, synthetic construct
  source 1..354: mol_type = other DNA
gatgttatgttagttgaatctggtggtggttctgttaaacctggtggttctttaaaattatcttgtgctgcttctggttttacttttactggttatgctatgtcttgggttcgtcaaactcctgaaaaacgtttagaatgggttgctactatttcttctggtggtaattatacttattatcctgattctttaaaaggtcgttttactatttctcgtgataatgctaaaaaaactttatatttacaaatgtcttctttacgttctgaagatactgctatgtattattgtgctcgttatttaggttatattccttttggttattggggtcaaggtactttagttactgtttctgct

SEQ ID NO: 2076 - protein, 8 aa, synthetic construct
GYTFTSYW

SEQ ID NO: 2077 - protein, 8 aa, synthetic construct
INPSNGGT

SEQ ID NO: 2078 - protein, 13 aa, synthetic construct
TRDYYGSSSWFAY

SEQ ID NO: 2079 - protein, 120 aa, synthetic construct
QVQLKQPGTELVKPGASVKLPCKASGYTFTSYWMHWVKHRPGQGLEWIGEINPSNGGTDFNEKFKSKATLTVDKSSSTAYMQLSSLTSEDSAVYYCTRDYYGSSSWFAYWGQGTLVTVSA

SEQ ID NO: 2080 - DNA, 360 bp, synthetic construct
  source 1..360: mol_type = other DNA
caagttcaattaaaacaacctggtactgaattagttaaacctggtgcttctgttaaattaccttgtaaagcttctggttatacttttacttcttattggatgcattgggttaaacatcgtcctggtcaaggtttagaatggattggtgaaattaatccttctaatggtggtactgattttaatgaaaaatttaaatctaaagctactttaactgttgataaatcttcttctactgcttatatgcaattatcttctttaacttctgaagattctgctgtttattattgtactcgtgattattatggttcttcttcttggtttgcttattggggtcaaggtactttagttactgtttctgct

SEQ ID NO: 2081 - protein, 8 aa, synthetic construct
GFTFIDYY

SEQ ID NO: 2082 - protein, 10 aa, synthetic construct
IGNKTNDYTT

SEQ ID NO: 2083 - protein, 12 aa, synthetic construct
VSLGRGYWYFDV

SEQ ID NO: 2084 - protein, 121 aa, synthetic construct
EVMLVESGGGLVQPGGSLRLSCATSGFTFIDYYMSWVRQPPGKALEWLGFIGNKTNDYTTEYSASVKGRFTISRDNSQSILYLQMNTLRAEDSATYYCVSLGRGYWYFDVWGAGTTVTVSS

SEQ ID NO: 2085 - DNA, 363 bp, synthetic construct
  source 1..363: mol_type = other DNA
gaagttatgttagttgaatctggtggtggtttagttcaacctggtggttctttacgtttatcttgtgctacttctggttttacttttattgattattatatgtcttgggttcgtcaacctcctggtaaagctttagaatggttaggttttattggtaataaaactaatgattatactactgaatattctgcttctgttaaaggtcgttttactatttctcgtgataattctcaatctattttatatttacaaatgaatactttacgtgctgaagattctgctacttattattgtgtttctttaggtcgtggttattggtattttgatgtttggggtgctggtactactgttactgtttcttct

SEQ ID NO: 2086 - protein, 8 aa, synthetic construct
GFPFGNYL

SEQ ID NO: 2087 - protein, 8 aa, synthetic construct
ISGGGVST

SEQ ID NO: 2088 - protein, 12 aa, synthetic construct
AREGTGYWYFDV

SEQ ID NO: 2089 - protein, 119 aa, synthetic construct
EVQLLESGGGLVQPGGSLRLSCAASGFPFGNYLMNWVRQAPGKGLEWVSVISGGGVSTYYADSVKGRFTISRDNSKNTLYLQMNSLRAEDTAMYYCAREGTGYWYFDVWGAGTTVTVSS

SEQ ID NO: 2090 - DNA, 357 bp, synthetic construct
  source 1..357: mol_type = other DNA
gaagttcaattattagaatctggtggtggtttagttcaacctggtggttctttacgtttatcttgtgctgcttctggttttccttttggtaattatttaatgaattgggttcgtcaagctcctggtaaaggtttagaatgggtttctgttatttctggtggtggtgtttctacttattatgctgattctgttaaaggtcgttttactatttctcgtgataattctaaaaatactttatatttacaaatgaattctttacgtgctgaagatactgctatgtattattgtgctcgtgaaggtactggttattggtattttgatgtttggggtgctggtactactgttactgtttcttct

SEQ ID NO: 2091 - protein, 8 aa, synthetic construct
GFTFSNYA

SEQ ID NO: 2092 - protein, 8 aa, synthetic construct
ISNGGDYT

SEQ ID NO: 2093 - protein, 11 aa, synthetic construct
ARRAYGEWFPY

SEQ ID NO: 2094 - protein, 118 aa, synthetic construct
EVKLVESGGGLVKPGGSLKLSCAASGFTFSNYAMSWVRQTPEKRLDWVATISNGGDYTYYPDSVKGRFTISRDNAKNILYLQMSSLRSEDTAMYYCARRAYGEWFPYWGQGTLVTVSA

SEQ ID NO: 2095 - DNA, 354 bp, synthetic construct
  source 1..354: mol_type = other DNA
gaagttaaattagttgaatctggtggtggtttagttaaacctggtggttctttaaaattatcttgtgctgcttctggttttactttttctaattatgctatgtcttgggttcgtcaaactcctgaaaaacgtttagattgggttgctactatttctaatggtggtgattatacttattatcctgattctgttaaaggtcgttttactatttctcgtgataatgctaaaaatattttatatttacaaatgtcttctttacgttctgaagatactgctatgtattattgtgctcgtcgtgcttatggtgaatggtttccttattggggtcaaggtactttagttactgtttctgct

SEQ ID NO: 2096 - protein, 8 aa, synthetic construct
GFTFTDYY

SEQ ID NO: 2097 - protein, 10 aa, synthetic construct
IRNKANGYTT

SEQ ID NO: 2098 - protein, 11 aa, synthetic construct
ARDNYGLWFAY

SEQ ID NO: 2099 - protein, 120 aa, synthetic construct
DVQLLESGGGLVQPGDSLRLSCATSGFTFTDYYMTWVRQPPGKALEWLGFIRNKANGYTTEYSASVKGRFTISRDNSQSILYLQMNTLRPEDSATYYCARDNYGLWFAYWGQGTLVTVSA

SEQ ID NO: 2100 - DNA, 360 bp, synthetic construct
  source 1..360: mol_type = other DNA
gatgttcaattattagaatctggtggtggtttagttcaacctggtgattctttacgtttatcttgtgctacttctggttttacttttactgattattatatgacttgggttcgtcaacctcctggtaaagctttagaatggttaggttttattcgtaataaagctaatggttatactactgaatattctgcttctgttaaaggtcgttttactatttctcgtgataattctcaatctattttatatttacaaatgaatactttacgtcctgaagattctgctacttattattgtgctcgtgataattatggtttatggtttgcttattggggtcaaggtactttagttactgtttctgct

SEQ ID NO: 2101 - protein, 9 aa, synthetic construct
GYSITSDYA

SEQ ID NO: 2102 - protein, 7 aa, synthetic construct
ISYSGYT

SEQ ID NO: 2103 - protein, 10 aa, synthetic construct
ARNYGRYFDV

SEQ ID NO: 2104 - protein, 117 aa, synthetic construct
QMQLKESGPGLVKPSQSLSLTCTVTGYSITSDYAWNWIRQFPGNKLEWMGYISYSGYTSYNPSLKSRISITRDTSKNQFFLQLNSVTSEDTATYYCARNYGRYFDVWGAGTTVTVSS

SEQ ID NO: 2105 - DNA, 351 bp, synthetic construct
  source 1..351: mol_type = other DNA
caaatgcaattaaaagaatctggtcctggtttagttaaaccttctcaatctttatctttaacttgtactgttactggttattctattacttctgattatgcttggaattggattcgtcaatttcctggtaataaattagaatggatgggttatatttcttattctggttatacttcttataatccttctttaaaatctcgtatttctattactcgtgatacttctaaaaatcaattttttttacaattaaattctgttacttctgaagatactgctacttattattgtgctcgtaattatggtcgttattttgatgtttggggtgctggtactactgttactgtttcttct

SEQ ID NO: 2106 - protein, 8 aa, synthetic construct
GFPFGNYL

SEQ ID NO: 2107 - protein, 8 aa, synthetic construct
ISGGGVST

SEQ ID NO: 2108 - protein, 9 aa, synthetic construct
ARDRNYFDY

SEQ ID NO: 2109 - protein, 116 aa, synthetic construct
EVQLLESGGGLVQPGGSLRLSCAASGFPFGNYLMNWVRQAPGKGLEWVSVISGGGVSTYYADSVKGRFTISRDNSKNTLYLQMSSLKSEDTAMYYCARDRNYFDYWGQGTTLTVSS

SEQ ID NO: 2110 - DNA, 348 bp, synthetic construct
  source 1..348: mol_type = other DNA
gaagttcaattattagaatctggtggtggtttagttcaacctggtggttctttacgtttatcttgtgctgcttctggttttccttttggtaattatttaatgaattgggttcgtcaagctcctggtaaaggtttagaatgggtttctgttatttctggtggtggtgtttctacttattatgctgattctgttaaaggtcgttttactatttctcgtgataattctaaaaatactttatatttacaaatgtcttctttaaaatctgaagatactgctatgtattattgtgctcgtgatcgtaattattttgattattggggtcaaggtactactttaactgtttcttct

SEQ ID NO: 2111 - protein, 8 aa, synthetic construct
GYSFTSYY

SEQ ID NO: 2112 - protein, 8 aa, synthetic construct
ILPGSGST

SEQ ID NO: 2113 - protein, 12 aa, synthetic construct
AKGGGSLWYFDV

SEQ ID NO: 2114 - protein, 119 aa, synthetic construct; identical to SEQ ID NO: 394

SEQ ID NO: 2115 - DNA, 357 bp, synthetic construct
  source 1..357: mol_type = other DNA
caagcttatttacaacaatctggtactgaattagttaaacctggtgcttctgttaaattatcttgtaaagcttctggttattcttttacttcttattatatgttttgggttaaaaaacgtcctggtcaaggtttagaatggattggtgaaattttacctggttctggttctactaattataatgaacaatttaaaggtaaagctacttttactgctgatccttcttctaatactgcttatatgcaattatcttctttaacttctgaagattctgctgtttattattgtgctaaaggtggtggttctttatggtattttgatgtttggggtgctggtactactgttactgtttcttct

SEQ ID NO: 2116 - protein, 8 aa, synthetic construct
GYTFTSYW

SEQ ID NO: 2117 - protein, 8 aa, synthetic construct
ISPSNGGA

SEQ ID NO: 2118 - protein, 11 aa, synthetic construct
TRGDLAGTVDY

SEQ ID NO: 2119 - protein, 118 aa, synthetic construct
QVQLQQPGAELVRPGASVKLSCKASGYTFTSYWINWVKQRPGQGLEWIGEISPSNGGANFNKKFKSKATLTVDKSSSTAYMQLSSLTSEDSAVYYCTRGDLAGTVDYWGQGTTLTVSS

SEQ ID NO: 2120 - DNA, 354 bp, synthetic construct
  source 1..354: mol_type = other DNA
caagttcaattacaacaacctggtgctgaattagttcgtcctggtgcttctgttaaattatcttgtaaagcttctggttatacttttacttcttattggattaattgggttaaacaacgtcctggtcaaggtttagaatggattggtgaaatttctccttctaatggtggtgctaattttaataaaaaatttaaatctaaagctactttaactgttgataaatcttcttctactgcttatatgcaattatcttctttaacttctgaagattctgctgtttattattgtactcgtggtgatttagctggtactgttgattattggggtcaaggtactactttaactgtttcttct

SEQ ID NO: 2121 - protein, 8 aa, synthetic construct
GYTFTNYG

SEQ ID NO: 2122 - protein, 8 aa, synthetic construct
IDTYTGEP

SEQ ID NO: 2123 - protein, 9 aa, synthetic construct
SRQLGLLDY

SEQ ID NO: 2124 - protein, 116 aa, synthetic construct; identical to SEQ ID NO: 454

SEQ ID NO: 2125 - DNA, 348 bp, synthetic construct
  source 1..348: mol_type = other DNA
caagttcaattacaacaatctggtcctgaattaaaaaaacctggtgaaactgttaaaatttcttgtaaagcttctggttatacttttactaattatggtatgaattgggttaaacaagctcctggtaaaggtttaaaatggatgggttggattgatacttatactggtgaacctacttatgctgatgattttaaaggtcgttttgctttttctttagaaacttctgcttctactgcttatttacaaattaataatttaaaaaatgaagatactgctacttatttttgttctcgtcaattaggtttattagattattggggtcaaggtactactttaactgtttcttct

SEQ ID NO: 2126 - protein, 8 aa, synthetic construct
GYTFTTAG

SEQ ID NO: 2127 - protein, 8 aa, synthetic construct
INTHSGVP

SEQ ID NO: 2128 - protein, 14 aa, synthetic construct
ARSPPYDSTWGFAY

SEQ ID NO: 2129 - protein, 121 aa, synthetic construct
QIQLAQSGPELKKPGETVRISCKASGYTFTTAGMQWVQKMPGKGLKWIGWINTHSGVPKYAEDFKGRFAFSLETSASTAYLQISNLKNEDTATYFCARSPPYDSTWGFAYWGQGTLVTVSA

SEQ ID NO: 2130 - DNA, 363 bp, synthetic construct
  source 1..363: mol_type = other DNA
caaattcaattagctcaatctggtcctgaattaaaaaaacctggtgaaactgttcgtatttcttgtaaagcttctggttatacttttactactgctggtatgcaatgggttcaaaaaatgcctggtaaaggtttaaaatggattggttggattaatactcattctggtgttcctaaatatgctgaagattttaaaggtcgttttgctttttctttagaaacttctgcttctactgcttatttacaaatttctaatttaaaaaatgaagatactgctacttatttttgtgctcgttctcctccttatgattctacttggggttttgcttattggggtcaaggtactttagttactgtttctgct

SEQ ID NO: 2131 - protein, 8 aa, synthetic construct
GYTFSSYW

SEQ ID NO: 2132 - protein, 8 aa, synthetic construct
INPSNGRT

SEQ ID NO: 2133 - protein, 14 aa, synthetic construct
TRPYYRYDDWYFDV

SEQ ID NO: 2134 - protein, 121 aa, synthetic construct
QVHLQQSGAELMKPGASVKISCKATGYTFSSYWIEWVKQRPGHGLEWIGEINPSNGRTNYNEKFKSTATLTVDKSSSTAYMQLSSLTSEDSAVYYCTRPYYRYDDWYFDVWGAGTTVTVSS

SEQ ID NO: 2135 - DNA, 363 bp, synthetic construct
  source 1..363: mol_type = other DNA
caagttcatttacaacaatctggtgctgaattaatgaaacctggtgcttctgttaaaatttcttgtaaagctactggttatactttttcttcttattggattgaatgggttaaacaacgtcctggtcatggtttagaatggattggtgaaattaatccttctaatggtcgtactaattataatgaaaaatttaaatctactgctactttaactgttgataaatcttcttctactgcttatatgcaattatcttctttaacttctgaagattctgctgtttattattgtactcgtccttattatcgttatgatgattggtattttgatgtttggggtgctggtactactgttactgtttcttct

SEQ ID NO: 2136 - protein, 9 aa, synthetic construct
GDSITSDYA

SEQ ID NO: 2137 - protein, 7 aa, synthetic construct
ISYSGNT

SEQ ID NO: 2138 - protein, 10 aa, synthetic construct
VRGMLTAFAY

SEQ ID NO: 2139 - protein, 117 aa, synthetic construct; identical to SEQ ID NO: 524

SEQ ID NO: 2140 - DNA, 351 bp, synthetic construct; identical to SEQ ID NO: 555
  source 1..351: mol_type = other DNA

SEQ ID NO: 2141 - protein, 8 aa, synthetic construct
GYTFTSYW

SEQ ID NO: 2142 - protein, 8 aa, synthetic construct
INPSNGRI

SEQ ID NO: 2143 - protein, 14 aa, synthetic construct
ARQGTYSYDAWFAY

SEQ ID NO: 2144 - protein, 121 aa, synthetic construct
QVQLQQPGAELVKPGASVKLSCKASGYTFTSYWMHWVKQRPGQGLEWIGEINPSNGRINYNEKFKSTATLTVDKSSSTAYMQLSSLTSEDSAVYYCARQGTYSYDAWFAYWGQGTLVTVSA

SEQ ID NO: 2145 - DNA, 363 bp, synthetic construct
  source 1..363: mol_type = other DNA
caagttcaattacaacaacctggtgctgaattagttaaacctggtgcttctgttaaattatcttgtaaagcttctggttatacttttacttcttattggatgcattgggttaaacaacgtcctggtcaaggtttagaatggattggtgaaattaatccttctaatggtcgtattaattataatgaaaaatttaaatctactgctactttaactgttgataaatcttcttctactgcttatatgcaattatcttctttaacttctgaagattctgctgtttattattgtgctcgtcaaggtacttattcttatgatgcttggtttgcttattggggtcaaggtactttagttactgtttctgct

SEQ ID NO: 2146 - protein, 8 aa, synthetic construct
GFTFSTYA

SEQ ID NO: 2147 - protein, 8 aa, synthetic construct
ISSGGSYT

SEQ ID NO: 2148 - protein, 12 aa, synthetic construct
ARGSYGNYWFAY

SEQ ID NO: 2149 - protein, 119 aa, synthetic construct
EVLLVESGGGLVKPGGSLKLSCAASGFTFSTYAMSWVRQTPEKRLEWVATISSGGSYTYYPDSVKGRFTISRDNAKNTLYLQMSSLRSEDTAMYYCARGSYGNYWFAYWGQGTLVTVSA

SEQ ID NO: 2150 - DNA, 357 bp, synthetic construct
  source 1..357: mol_type = other DNA
gaagttttattagttgaatctggtggtggtttagttaaacctggtggttctttaaaattatcttgtgctgcttctggttttactttttctacttatgctatgtcttgggttcgtcaaactcctgaaaaacgtttagaatgggttgctactatttcttctggtggttcttatacttattatcctgattctgttaaaggtcgttttactatttctcgtgataatgctaaaaatactttatatttacaaatgtcttctttacgttctgaagatactgctatgtattattgtgctcgtggttcttatggtaattattggtttgcttattggggtcaaggtactttagttactgtttctgct

SEQ ID NO: 2151 - protein, 8 aa, synthetic construct
GFNIKDTY

SEQ ID NO: 2152 - protein, 8 aa, synthetic construct
IDPANGDT

SEQ ID NO: 2153 - protein, 9 aa, synthetic construct
ARGGYGYTY

SEQ ID NO: 2154 - protein, 116 aa, synthetic construct
EVRLQQSGAELVKPGASVKLSCTASGFNIKDTYMHWVKQRPEQGLEWIGRIDPANGDTEYDPRFQGKATITATTSSNTAYLQLSSQTSEDSAVYYCARGGYGYTYWGQGTTLTVSS

SEQ ID NO: 2155 - DNA, 348 bp, synthetic construct
  source 1..348: mol_type = other DNA
gaagttcgtttacaacaatctggtgctgaattagttaaacctggtgcttctgttaaattatcttgtactgcttctggttttaatattaaagatacttatatgcattgggttaaacaacgtcctgaacaaggtttagaatggattggtcgtattgatcctgctaatggtgatactgaatatgatcctcgttttcaaggtaaagctactattactgctactacttcttctaatactgcttatttacaattatcttctcaaacttctgaagattctgctgtttattattgtgctcgtggtggttatggttatacttattggggtcaaggtactactttaactgtttcttct

SEQ ID NO: 2156 - protein, 8 aa, synthetic construct
GFNISDYY

SEQ ID NO: 2157 - protein, 8 aa, synthetic construct
IDPANGDT

SEQ ID NO: 2158 - protein, 7 aa, synthetic construct
KDGHFDS

SEQ ID NO: 2159 - protein, 114 aa, synthetic construct
EVRLQQSGAELVRSGASVKLSCSASGFNISDYYVHWVKQRPEQGLEWIGWIDPANGDTEYAPKFQDKATLTADPSSNTAYLQLSSLTSEDTAVYYCKDGHFDSWGQGTTLTVSS

SEQ ID NO: 2160 - DNA, 342 bp, synthetic construct
  source 1..342: mol_type = other DNA
gaagttcgtttacaacaatctggtgctgaattagttcgttctggtgcttctgttaaattatcttgttctgcttctggttttaatatttctgattattatgttcattgggttaaacaacgtcctgaacaaggtttagaatggattggttggattgatcctgctaatggtgatactgaatatgctcctaaatttcaagataaagctactttaactgctgatccttcttctaatactgcttatttacaattatcttctttaacttctgaagatactgctgtttattattgtaaagatggtcattttgattcttggggtcaaggtactactttaactgtttcttct

SEQ ID NO: 2161 - protein, 8 aa, synthetic construct
GFPFGNYL

SEQ ID NO: 2162 - protein, 8 aa, synthetic construct
ISGGGVST

SEQ ID NO: 2163 - protein, 12 aa, synthetic construct
ARGPSSWPAFDV

SEQ ID NO: 2164 - protein, 119 aa, synthetic construct; identical to SEQ ID NO: 434

SEQ ID NO: 2165 - DNA, 357 bp, synthetic construct; identical to SEQ ID NO: 545
  source 1..357: mol_type = other DNA

SEQ ID NO: 2166 - protein, 8 aa, synthetic construct
GYTFTSYW

SEQ ID NO: 2167 - protein, 8 aa, synthetic construct
IDPYDSET

SEQ ID NO: 2168 - protein, 13 aa, synthetic construct
ASRFITTVLGFDY

SEQ ID NO: 2169 - protein, 120 aa, synthetic construct
QIQLQQPGAELVKPGASVKLSCKASGYTFTSYWMNWVKQRPEQGLEWIGRIDPYDSETHYNQKFKDKAILTVDKSSSTAYMQLSSLTSEDSAVYYCASRFITTVLGFDYWGQGTTLTVSS

SEQ ID NO: 2170 - DNA, 360 bp, synthetic construct
  source 1..360: mol_type = other DNA
caaattcaattacaacaacctggtgctgaattagttaaacctggtgcttctgttaaattatcttgtaaagcttctggttatacttttacttcttattggatgaattgggttaaacaacgtcctgaacaaggtttagaatggattggtcgtattgatccttatgattctgaaactcattataatcaaaaatttaaagataaagctattttaactgttgataaatcttcttctactgcttatatgcaattatcttctttaacttctgaagattctgctgtttattattgtgcttctcgttttattactactgttttaggttttgattattggggtcaaggtactactttaactgtttcttct

SEQ ID NO: 2171 - protein, 8 aa, synthetic construct
GFNIKDTY

SEQ ID NO: 2172 - protein, 8 aa, synthetic construct
IDPENGNT

SEQ ID NO: 2173 - protein, 6 aa, synthetic construct
IRSGHY

SEQ ID NO: 2174 - protein, 113 aa, synthetic construct; identical to SEQ ID NO: 414

SEQ ID NO: 2175 - DNA, 339 bp, synthetic construct
  source 1..339: mol_type = other DNA
gaagttcgtttacaacaatctggtgctgaattagttaaacctggtgcttctgttaaattatcttgtactgcttctggttttaatattaaagatacttatatgcattgggttaaacaacgtcctgaacaaggtttagaatggattggttggattgatcctgaaaatggtaatactaaatatgatcctaaatttcaaggtaaagctactattactactgatacttcttctaatactgcttatttacaattatcttctttaacttctgaagattctgctgtttattattgtattcgttctggtcattattggggtcaaggtactactgttactgtttcttct

SEQ ID NO: 2176 - protein, 8 aa, synthetic construct
GYTFTSYW

SEQ ID NO: 2177 - protein, 8 aa, synthetic construct
IDPSDYET

SEQ ID NO: 2178 - protein, 11 aa, synthetic construct
TRGDYRSWFAY

SEQ ID NO: 2179 - protein, 118 aa, synthetic construct
QIQLQQPGAELVKPGASVKLSCKASGYTFTSYWMNWVKQRPGRGLEWIGRIDPSDYETHYNQNFKDKATLTIDKSSSTAYMELRSLTSEDSAVYYCTRGDYRSWFAYWGQGTLVTVSA

SEQ ID NO: 2180 - DNA, 354 bp, synthetic construct
  source 1..354: mol_type = other DNA
caaattcaattacaacaacctggtgctgaattagttaaacctggtgcttctgttaaattatcttgtaaagcttctggttatacttttacttcttattggatgaattgggttaaacaacgtcctggtcgtggtttagaatggattggtcgtattgatccttctgattatgaaactcattataatcaaaattttaaagataaagctactttaactattgataaatcttcttctactgcttatatggaattacgttctttaacttctgaagattctgctgtttattattgtactcgtggtgattatcgttcttggtttgcttattggggtcaaggtactttagttactgtttctgct

SEQ ID NO: 2181 - protein, 8 aa, synthetic construct
GYTFTSYD

SEQ ID NO: 2182 - protein, 8 aa, synthetic construct
IFPGDGTS

SEQ ID NO: 2183 - protein, 7 aa, synthetic construct
ARKLGAY

SEQ ID NO: 2184 - protein, 114 aa, synthetic construct
EVQLVQSGAEVKKPGASVKLSCKASGYTFTSYDINWVRQAPGQGLEWIGWIFPGDGTSKYAQKFQGRATLTTDKSTSTAYMELSSLRSEDTAVYYCARKLGAYWGQGTTLTVSS

SEQ ID NO: 2185 - DNA, 342 bp, synthetic construct
  source 1..342: mol_type = other DNA
gaagttcaattagttcaatctggtgctgaagttaaaaaacctggtgcttctgttaaattatcttgtaaagcttctggttatacttttacttcttatgatattaattgggttcgtcaagctcctggtcaaggtttagaatggattggttggatttttcctggtgatggtacttctaaatatgctcaaaaatttcaaggtcgtgctactttaactactgataaatctacttctactgcttatatggaattatcttctttacgttctgaagatactgctgtttattattgtgctcgtaaattaggtgcttattggggtcaaggtactactttaactgtttcttct

SEQ ID NO: 2186 - protein, 8 aa, synthetic construct
GYTFTSYD

SEQ ID NO: 2187 - protein, 8 aa, synthetic construct
IFPGDGTS

SEQ ID NO: 2188 - protein, 7 aa, synthetic construct
ARRAGNY

SEQ ID NO: 2189 - protein, 114 aa, synthetic construct; identical to SEQ ID NO: 504

SEQ ID NO: 2190 - DNA, 342 bp, synthetic construct
  source 1..342: mol_type = other DNA
gaagttcaattagttcaatctggtgctgaagttaaaaaacctggtgcttctgttaaattatcttgtaaagcttctggttatacttttacttcttatgatattaattgggttcgtcaagctcctggtcaaggtttagaatggattggttggatttttcctggtgatggtacttctaaatatgctcaaaaatttcaaggtcgtgctactttaactactgataaatctacttctactgcttatatggaattatcttctttacgttctgaagatactgctgtttattattgtgctcgtcgtgctggtaattattggggtcaaggtactactttaactgtttcttct

SEQ ID NO: 2191 - protein, 11 aa, synthetic construct
QSLVHSNGNTY

SEQ ID NO: 2192 - skipped

SEQ ID NO: 2193 - protein, 10 aa, synthetic construct
SQSTHVPPYT

SEQ ID NO: 2194 - protein, 113 aa, synthetic construct; identical to SEQ ID NO: 399

SEQ ID NO: 2195 - DNA, 339 bp, synthetic construct; identical to SEQ ID NO: 630
  source 1..339: mol_type = other DNA

SEQ ID NO: 2196 - protein, 10 aa, synthetic construct
QSVDSDGDSY

SEQ ID NO: 2197 - skipped

SEQ ID NO: 2198 - protein, 9 aa, synthetic construct
QQSHEYPFT

SEQ ID NO: 2199 - protein, 111 aa, synthetic construct; identical to SEQ ID NO: 419

SEQ ID NO: 2200 - DNA, 333 bp, synthetic construct
  source 1..333: mol_type = other DNA
gatattcaattaactcaatctccttcttctttatctgcttctgttggtgatcgtgttactattacttgtaaagcttctcaatctgttgattctgatggtgattcttatatgaattggtatcaacaaaaacctggtaaagctcctaaattattaatttatggtgcttctaatttagaatctggtgttccttctcgtttttctggttctggttctggtactgattttactttaactatttcttctttacaacctgaagattttgctacttattattgtcaacaatctcatgaatatccttttacttttggtcaaggtactaaattagaaattaaa

SEQ ID NO: 2201 - protein, 6 aa, synthetic construct
QSISSY

SEQ ID NO: 2202 - skipped

SEQ ID NO: 2203 - protein, 9 aa, synthetic construct
QQSYGNPPT

SEQ ID NO: 2204 - protein, 107 aa, synthetic construct; identical to SEQ ID NO: 289

SEQ ID NO: 2205 - DNA, 321 bp, synthetic construct; identical to SEQ ID NO: 290
  source 1..321: mol_type = other DNA

SEQ ID NO: 2206 - protein, 6 aa, synthetic construct
ETISNF

SEQ ID NO: 2207 - skipped

SEQ ID NO: 2208 - protein, 9 aa, synthetic construct
QQFYSVPWT

SEQ ID NO: 2209 - protein, 107 aa, synthetic construct; identical to SEQ ID NO: 429

SEQ ID NO: 2210 - DNA, 321 bp, synthetic construct
  source 1..321: mol_type = other DNA
gatattcaaatgactcaatctccttcttctttatctgcttctgttggtgatcgtgttactattacttgtcgtgcttctgaaactatttctaattttttaaattggtatcaacaaaaacctggtaaagctcctaaattattaatttatactacttcttctttacaacgtggtgttccttctcgtttttctggttctggttctggtactgattttactttaactatttcttctttacaacctgaagattttgctacttattattgtcaacaattttattctgttccttggacttttggtggtggtactaaagttgaaattaaa

SEQ ID NO: 2211 - protein, 6 aa, synthetic construct
ETISNF

SEQ ID NO: 2212 - skipped

SEQ ID NO: 2213 - protein, 9 aa, synthetic construct
QQSYSVPWT

SEQ ID NO: 2214 - protein, 106 aa, synthetic construct; identical to SEQ ID NO: 489

SEQ ID NO: 2215 - DNA, 318 bp, synthetic construct
  source 1..318: mol_type = other DNA
gatattcaaatgactcaatctccttcttctttatctgcttctgttggtgatcgtgttactattacttgtcgtgcttctgaaactatttctaattttttaaattggtatcaacaaaaacctggtaaagctcctaaattattaatttatactacttcttctttacaacgtggtgttccttctcgtttttctggttctggttctggtactgattttactttaactatttcttctttacaacctgaagattttgctacttattattgtcaacaatcttattctgttccttggacttttggtggtactaaagttgaaattaaa

SEQ ID NO: 2216 - protein, 6 aa, synthetic construct
ETISNF

SEQ ID NO: 2217 - skipped

SEQ ID NO: 2218 - protein, 9 aa, synthetic construct
QQSYSVPWT

SEQ ID NO: 2219 - protein, 106 aa, synthetic construct
DIQMTQSPSSLSASVGDRVTITCRASETISNFLNWYQQKPGKAPKLLIYTTSSLQRGVPSRFSGSGSGTDFTLTISSLQPEDFATYCQQSYSVPWTFGGGTKVEIK

SEQ ID NO: 2220 - DNA, 318 bp, synthetic construct
  source 1..318: mol_type = other DNA
gatattcaaatgactcaatctccttcttctttatctgcttctgttggtgatcgtgttactattacttgtcgtgcttctgaaactatttctaattttttaaattggtatcaacaaaaacctggtaaagctcctaaattattaatttatactacttcttctttacaacgtggtgttccttctcgtttttctggttctggttctggtactgattttactttaactatttcttctttacaacctgaagattttgctacttattgtcaacaatcttattctgttccttggacttttggtggtggtactaaagttgaaattaaa

SEQ ID NO: 2221 - protein, 6 aa, synthetic construct
QNVGTN

SEQ ID NO: 2222 - skipped

SEQ ID NO: 2223 - protein, 8 aa, synthetic construct
QQYDSYYT

SEQ ID NO: 2224 - protein, 106 aa, synthetic construct
DIVMSQSQKFMSTSVGDRVSVTCKASQNVGTNVAWYQQKPGQSPKALIYSASYRYSGVPDRFTGSGSGTDFTLTISNVQSEDLAEYFCQQYDSYYTFGGGTKLEMK

SEQ ID NO: 2225 - DNA, 318 bp, synthetic construct
  source 1..318: mol_type = other DNA
gatattgttatgtctcaatctcaaaaatttatgtctacttctgttggtgatcgtgtttctgttacttgtaaagcttctcaaaatgttggtactaatgttgcttggtatcaacaaaaacctggtcaatctcctaaagctttaatttattctgcttcttatcgttattctggtgttcctgatcgttttactggttctggttctggtactgattttactttaactatttctaatgttcaatctgaagatttagctgaatatttttgtcaacaatatgattcttattatacttttggtggtggtactaaattagaaatgaaa

SEQ ID NO: 2226 - protein, 11 aa, synthetic construct
QSLVHSNGNTY

SEQ ID NO: 2227 - skipped

SEQ ID NO: 2228 - protein, 9 aa, synthetic construct
WQGTHFPRT

SEQ ID NO: 2229 - protein, 112 aa, synthetic construct
DVVMTQTPLSLPVSLGDQASISCRSSQSLVHSNGNTYLNWYLQKAGQSPKRLIYLVSKLDSGVPDRFTGSGSGTDFTLKISRVEAEDLGVYYCWQGTHFPRTFGGGTKLEIK

SEQ ID NO: 2230 - DNA, 336 bp, synthetic construct
  source 1..336: mol_type = other DNA
gatgttgttatgactcaaactcctttatctttacctgtttctttaggtgatcaagcttctatttcttgtcgttcttctcaatctttagttcattctaatggtaatacttatttaaattggtatttacaaaaagctggtcaatctcctaaacgtttaatttatttagtttctaaattagattctggtgttcctgatcgttttactggttctggttctggtactgattttactttaaaaatttctcgtgttgaagctgaagatttaggtgtttattattgttggcaaggtactcattttcctcgtacttttggtggtggtactaaattagaaattaaa

SEQ ID NO: 2231 - protein, 6 aa, synthetic construct
ETISNF

SEQ ID NO: 2232 - skipped

SEQ ID NO: 2233 - protein, 8 aa, synthetic construct
QQSSVPWT

SEQ ID NO: 2234 - protein, 106 aa, synthetic construct; identical to SEQ ID NO: 529

SEQ ID NO: 2235 - DNA, 318 bp, synthetic construct
  source 1..318: mol_type = other DNA
gatattcaaatgactcaatctccttcttctttatctgcttctgttggtgatcgtgttactattacttgtcgtgcttctgaaactatttctaattttttaaattggtatcaacaaaaacctggtaaagctcctaaattattaatttatactacttcttctttacaacgtggtgttccttctcgtttttctggttctggttctggtactgattttactttaactatttcttctttacaacctgaagattttgctacttattattgtcaacaatcttctgttccttggacttttggtggtggtactaaagttgaaattaaa

SEQ ID NO: 2236 - protein, 6 aa, synthetic construct
ETISNF

SEQ ID NO: 2237 - skipped

SEQ ID NO: 2238 - protein, 8 aa, synthetic construct
QQSYSVPT

SEQ ID NO: 2239 - protein, 106 aa, synthetic construct
DIQMTQSPSSLSASVGDRVTITCRASETISNFLNWYQQKPGKAPKLLIYTTSSLQRGVPSRFSGSGSGTDFTLTISSLQPEDFATYYCQQSYSVPTFGGGTKVEIK

SEQ ID NO: 2240 - DNA, 318 bp, synthetic construct
  source 1..318: mol_type = other DNA
gatattcaaatgactcaatctccttcttctttatctgcttctgttggtgatcgtgttactattacttgtcgtgcttctgaaactatttctaattttttaaattggtatcaacaaaaacctggtaaagctcctaaattattaatttatactacttcttctttacaacgtggtgttccttctcgtttttctggttctggttctggtactgattttactttaactatttcttctttacaacctgaagattttgctacttattattgtcaacaatcttattctgttcctacttttggtggtggtactaaagttgaaattaaa

SEQ ID NO: 2241 - protein, 6 aa, synthetic construct
QDVGTA

SEQ ID NO: 2242 - skipped

SEQ ID NO: 2243 - protein, 9 aa, synthetic construct
QQYNTYPYT

SEQ ID NO: 2244 - protein, 107 aa, synthetic construct
DIVMSQSHKFMSTSVGDRVSITCKASQDVGTAVAWYQQKPGQSPKLLIYWASTRHTGVPDRFTGSGSGTDFTLTISNVQSEDLAEYFCQQYNTYPYTFGGGTKLEMK

SEQ ID NO: 2245 - DNA, 321 bp, synthetic construct
  source 1..321: mol_type = other DNA
gatattgttatgtctcaatctcataaatttatgtctacttctgttggtgatcgtgtttctattacttgtaaagcttctcaagatgttggtactgctgttgcttggtatcaacaaaaacctggtcaatctcctaaattattaatttattgggcttctactcgtcatactggtgttcctgatcgttttactggttctggttctggtactgattttactttaactatttctaatgttcaatctgaagatttagctgaatatttttgtcaacaatataatacttatccttatacttttggtggtggtactaaattagaaatgaaa

SEQ ID NO: 2246 - protein, 6 aa, synthetic construct
TDIDDD

SEQ ID NO: 2247 - skipped

SEQ ID NO: 2248 - protein, 9 aa, synthetic construct
LQSDNLPLT

SEQ ID NO: 2249 - protein, 107 aa, synthetic construct
DTTVTQSPASLSMAIGEKVTIRCITSTDIDDDMNWYQQKPGEPPKLLISEGNTLRPGVPSRFSSSGYGTDFVFTIENMLSEDVADYYCLQSDNLPLTFGAGTKLEIK

SEQ ID NO: 2250 - DNA, 321 bp, synthetic construct
  source 1..321: mol_type = other DNA
gatactactgttactcaatctcctgcttctttatctatggctattggtgaaaaagttactattcgttgtattacttctactgatattgatgatgatatgaattggtatcaacaaaaacctggtgaacctcctaaattattaatttctgaaggtaatactttacgtcctggtgttccttctcgtttttcttcttctggttatggtactgattttgtttttactattgaaaatatgttatctgaagatgttgctgattattattgtttacaatctgataatttacctttaacttttggtgctggtactaaattagaaattaaa

SEQ ID NO: 2251 - protein, 6 aa, synthetic construct
QNVGTN

SEQ ID NO: 2252 - skipped

SEQ ID NO: 2253 - protein, 9 aa, synthetic construct
QQCNSYPWT

SEQ ID NO: 2254 - protein, 107 aa, synthetic construct
DIVMSQSQKFMSTSVGDRVSVTCKASQNVGTNVAWYQQKPGQSPKALIYSASYRYSGVPDRFTGSGSGTDFTLTISNVQSEDLAEYFCQQCNSYPWTFGGGTKLEIK

SEQ ID NO: 2255 - DNA, 321 bp, synthetic construct
  source 1..321: mol_type = other DNA
gatattgttatgtctcaatctcaaaaatttatgtctacttctgttggtgatcgtgtttctgttacttgtaaagcttctcaaaatgttggtactaatgttgcttggtatcaacaaaaacctggtcaatctcctaaagctttaatttattctgcttcttatcgttattctggtgttcctgatcgttttactggttctggttctggtactgattttactttaactatttctaatgttcaatctgaagatttagctgaatatttttgtcaacaatgtaattcttatccttggacttttggtggtggtactaaattagaaattaaa

SEQ ID NO: 2256 - protein, 6 aa, synthetic construct
QDVGTA

SEQ ID NO: 2257 - skipped

SEQ ID NO: 2258 - protein, 10 aa, synthetic construct
QQYNSYPQYT

SEQ ID NO: 2259 - protein, 108 aa, synthetic construct; identical to SEQ ID NO: 519

SEQ ID NO: 2260 - DNA, 324 bp, synthetic construct
  source 1..324: mol_type = other DNA
gatattgttatgtctcaatctcataaatttatgtctacttctgttggtgatcgtgtttctattacttgtaaagcttctcaagatgttggtactgctgttgcttggtatcaacaaaaacctggtcaatctcctaaattattaatttattgggcttctactcgtcatactggtgttcctgatcgttttactggttctggttctggtactgattttactttaactatttctaatgttcaatctgaagatttagctgaatatttttgtcaacaatataattcttatcctcaatatacttttggtggtggtactaaattagaaattaaa

SEQ ID NO: 2261 - protein, 6 aa, synthetic construct
QDVGTA

SEQ ID NO: 2262 - skipped

SEQ ID NO: 2263 - protein, 8 aa, synthetic construct
HQYLSSRT

SEQ ID NO: 2264 - protein, 106 aa, synthetic construct
DIVMSQSHKFMSTSVGDRVSITCKASQDVGTAVAWYQQKPGQSPKALIYSASYRYSGVPDRFTGSGSGTDFTLTISSVQAEDLAVYYCHQYLSSRTFGGGTKLEIK

SEQ ID NO: 2265 - DNA, 318 bp, synthetic construct
  source 1..318: mol_type = other DNA
gatattgttatgtctcaatctcataaatttatgtctacttctgttggtgatcgtgtttctattacttgtaaagcttctcaagatgttggtactgctgttgcttggtatcaacaaaaacctggtcaatctcctaaagctttaatttattctgcttcttatcgttattctggtgttcctgatcgttttactggttctggttctggtactgattttactttaactatttcttctgttcaagctgaagatttagctgtttattattgtcatcaatatttatcttctcgtacttttggtggtggtactaaattagaaattaaa

SEQ ID NO: 2266 - protein, 6 aa, synthetic construct
QDVSTA

SEQ ID NO: 2267 - skipped

SEQ ID NO: 2268 - protein, 9 aa, synthetic construct
QQYYSYPRT

SEQ ID NO: 2269 - protein, 107 aa, synthetic construct
DVQMTQSHKFMSTSVGDRVSITCKASQDVSTAVAWYQQKPGQSPKLLIYWASTRESGVPDRFTGSGSGTDFTLTISSVKAEDLAVYYCQQYYSYPRTFGGGTKLEIK

SEQ ID NO: 2270 - DNA, 321 bp, synthetic construct
  source 1..321: mol_type = other DNA
gatgttcaaatgactcaatctcataaatttatgtctacttctgttggtgatcgtgtttctattacttgtaaagcttctcaagatgtttctactgctgttgcttggtatcaacaaaaacctggtcaatctcctaaattattaatttattgggcttctactcgtgaatctggtgttcctgatcgttttactggttctggttctggtactgattttactttaactatttcttctgttaaagctgaagatttagctgtttattattgtcaacaatattattcttatcctcgtacttttggtggtggtactaaattagaaattaaa

SEQ ID NO: 2271 - protein, 5 aa, synthetic construct
SSVSY

SEQ ID NO: 2272 - skipped

SEQ ID NO: 2273 - protein, 7 aa, synthetic construct
HQWSSGT

SEQ ID NO: 2274 - protein, 104 aa, synthetic construct
DIVMTQSPAIMSASPGEKVTMTCSASSSVSYMHWYQQKSGTSPKRWIYDTSKLASGVPSRFSGSGSGTFYSLTISSVEAEDAADYYCHQWSSGTFGGGTKLEIK

SEQ ID NO: 2275 - DNA, 312 bp, synthetic construct
  source 1..312: mol_type = other DNA
gatattgttatgactcaatctcctgctattatgtctgcttctcctggtgaaaaagttactatgacttgttctgcttcttcttctgtttcttatatgcattggtatcaacaaaaatctggtacttctcctaaacgttggatttatgatacttctaaattagcttctggtgttccttctcgtttttctggttctggttctggtactttttattctttaactatttcttctgttgaagctgaagatgctgctgattattattgtcatcaatggtcttctggtacttttggtggtggtactaaattagaaattaaa

SEQ ID NO: 2276 - protein, 5 aa, synthetic construct
SSVSY

SEQ ID NO: 2277 - skipped

SEQ ID NO: 2278 - protein, 9 aa, synthetic construct
QQWSSYPYT

SEQ ID NO: 2279 - protein, 106 aa, synthetic construct
DIVLTQSPAIMSASPGEKVTMTCSASSSVSYMHWYQQKSGTSPKRWIYDTSKLASGVPARFSGSGSGTSYSLTISSMEAEDAATYYCQQWSSYPYTFGGGTKLEIK

SEQ ID NO: 2280 - DNA, 318 bp, synthetic construct
  source 1..318: mol_type = other DNA
gatattgttttaactcaatctcctgctattatgtctgcttctcctggtgaaaaagttactatgacttgttctgcttcttcttctgtttcttatatgcattggtatcaacaaaaatctggtacttctcctaaacgttggatttatgatacttctaaattagcttctggtgttcctgctcgtttttctggttctggttctggtacttcttattctttaactatttcttctatggaagctgaagatgctgctacttattattgtcaacaatggtcttcttatccttatacttttggtggtggtactaaattagaaattaaa

SEQ ID NO: 2281 - protein, 5 aa, synthetic construct
SSVIY

SEQ ID NO: 2282 - skipped

SEQ ID NO: 2283 - protein, 9 aa, synthetic construct
QQKSTYPWT

SEQ ID NO: 2284 - protein, 106 aa, synthetic construct
DIVLTQSPAIMSASPGEKVTITCSASSSVIYIHWFQQKPGTSPKLWIYSTSNLASGVPARFSGNGSGTSYSLTISRMEAEDAVTYYCQQKSTYPWTFGGGTKLEIK

SEQ ID NO: 2285 - DNA, 318 bp, synthetic construct
  source 1..318: mol_type = other DNA
gatattgttttaactcaatctcctgctattatgtctgcttctcctggtgaaaaagttactattacttgttctgcttcttcttctgttatttatattcattggtttcaacaaaaacctggtacttctcctaaattatggatttattctacttctaatttagcttctggtgttcctgctcgtttttctggtaatggttctggtacttcttattctttaactatttctcgtatggaagctgaagatgctgttacttattattgtcaacaaaaatctacttatccttggacttttggtggtggtactaaattagaaattaaa

SEQ ID NO: 2286 - protein, 5 aa, synthetic construct
SSVSY

SEQ ID NO: 2287 - skipped

SEQ ID NO: 2288 - protein, 9 aa, synthetic construct
FQGSGYPLT

SEQ ID NO: 2289 - protein, 106 aa, synthetic construct
DIVLTQSPAIMSASPGEKVTMTCSASSSVSYMHWYQQKSGTSPKRWIYDTSKLASGVPARFSGSGSGNSYSLTISSMEAEDVATYYCFQGSGYPLTFGGGTKLEIK

SEQ ID NO: 2290 - DNA, 318 bp, synthetic construct
  source 1..318: mol_type = other DNA
gatattgttttaactcaatctcctgctattatgtctgcttctcctggtgaaaaagttactatgacttgttctgcttcttcttctgtttcttatatgcattggtatcaacaaaaatctggtacttctcctaaacgttggatttatgatacttctaaattagcttctggtgttcctgctcgtttttctggttctggttctggtaattcttattctttaactatttcttctatggaagctgaagatgttgctacttattattgttttcaaggttctggttatcctttaacttttggtggtggtactaaattagaaattaaa

SEQ ID NO: 2291 - protein, 6 aa, synthetic construct
GDIRNY

SEQ ID NO: 2292 - skipped

SEQ ID NO: 2293 - protein, 9 aa, synthetic construct
QHHYGTPPT

SEQ ID NO: 2294 - protein, 107 aa, synthetic construct; identical to SEQ ID NO: 439

SEQ ID NO: 2295 - DNA, 321 bp, synthetic construct
  source 1..321: mol_type = other DNA
gatattcaaatgactcaatctcctgcttctttatctgcttctgttggtgaaactgttactattacttgtcgtgcttctggtgatattcgtaattatttaatttggtatcaacaaaaacaaggtaaatctcctcaagttttagtttataatgctaaaactttagctgatggtgttccttctcgtttttctggttctggttctggtactcaattttctttaaaaattaattctttacaacctgaagattttggttcttattattgtcaacatcattatggtactcctcctacttttggtggtggtactaaattagaaattaaa

SEQ ID NO: 2296 - protein, 6 aa, synthetic construct
QDINKY

SEQ ID NO: 2297 - skipped

SEQ ID NO: 2298 - protein, 9 aa, synthetic construct
LQYDNLLWT

SEQ ID NO: 2299 - protein, 107 aa, synthetic construct
DIQMTQSPSSLSASLGGKVTITCKASQDINKYIAWYQHKPGKGPRLLIHYTSTLQPGIPSRFSGSGSGRDYSFSISNLEPEDIATYYCLQYDNLLWTFGGGTKLEMK

SEQ ID NO: 2300 - DNA, 321 bp, synthetic construct
  source 1..321: mol_type = other DNA
gatattcaaatgactcaatctccttcttctttatctgcttctttaggtggtaaagttactattacttgtaaagcttctcaagatattaataaatatattgcttggtatcaacataaacctggtaaaggtcctcgtttattaattcattatacttctactttacaacctggtattccttctcgtttttctggttctggttctggtcgtgattattctttttctatttctaatttagaacctgaagatattgctacttattattgtttacaatatgataatttattatggacttttggtggtggtactaaattagaaatgaaa

SEQ ID NO: 2301 - protein, 6 aa, synthetic construct
QDINKF

SEQ ID NO: 2302 - skipped

SEQ ID NO: 2303 - protein, 8 aa, synthetic construct
LQYDTLWT

SEQ ID NO: 2304 - protein, 106 aa, synthetic construct
DIQMTQSPSSLSASLGGKVTITCKASQDINKFITWYQHKPGKGPRLLIHYTSTLQPGIPSRFSGSGSGRDYSFSISNLEPEDIATYYCLQYDTLWTFGGGTKLEMK

SEQ ID NO: 2305 - DNA, 318 bp, synthetic construct
  source 1..318: mol_type = other DNA
gatattcaaatgactcaatctccttcttctttatctgcttctttaggtggtaaagttactattacttgtaaagcttctcaagatattaataaatttattacttggtatcaacataaacctggtaaaggtcctcgtttattaattcattatacttctactttacaacctggtattccttctcgtttttctggttctggttctggtcgtgattattctttttctatttctaatttagaacctgaagatattgctacttattattgtttacaatatgatactttatggacttttggtggtggtactaaattagaaatgaaa

SEQ ID NO: 2306 - protein, 6 aa, synthetic construct
QDVGTA

SEQ ID NO: 2307 - skipped

SEQ ID NO: 2308 - protein, 9 aa, synthetic construct
QQHYSPPYT

SEQ ID NO: 2309 - protein, 107 aa, synthetic construct; identical to SEQ ID NO: 509

SEQ ID NO: 2310 - DNA, 321 bp, synthetic construct
  source 1..321: mol_type = other DNA
gatgttgttatgactcaatctcataaatttatgtctacttctgttggtgatcgtgtttctattacttgtaaagcttctcaagatgttggtactgctgttgcttggtatcaacaaaaacctggtcaatctcctaaagctttaatttattgggcttctactcgtcatactggtgttcctgatcgttttactggttctggttctggtactgattttacttttactatttcttctgttcaagctgaagatttagctgtttattattgtcaacaacattattctcctccttatacttttggtggtggtactaaattagaaatgaaa

SEQ ID NO: 2311 - protein, 10 aa, synthetic construct
TSNIGSGNNY

SEQ ID NO: 2312 - skipped

SEQ ID NO: 2313 - protein, 9 aa, synthetic construct
QQYHTYPFT

SEQ ID NO: 2314 - protein, 111 aa, synthetic construct; identical to SEQ ID NO: 499

SEQ ID NO: 2315 - DNA, 333 bp, synthetic construct
  source 1..333: mol_type = other DNA
gatattcaattaactcaatctccttcttctttatctgcttctgttggtgatcgtgttactattacttgtaaagcttctacttctaatattggttctggtaataattatatgaattggtatcaacaaaaacctggtaaagctcctaaattattaatttatggtgcttctaatttagaatctggtgttccttctcgtttttctggttctggttctggtactgattttactttaactatttcttctttacaacctgaagattttgctacttattattgtcaacaatatcatacttatccttttacttttggtcaaggtactaaattagaaattaaa

SEQ ID NO: 2316 - protein, 10 aa, synthetic construct
QSVDSDGDSY

SEQ ID NO: 2317 - skipped

SEQ ID NO: 2318 - protein, 9 aa, synthetic construct
QQYHSHPYT

SEQ ID NO: 2319 - protein, 111 aa, synthetic construct; identical to SEQ ID NO: 459

SEQ ID NO: 2320 - DNA, 333 bp, synthetic construct
  source 1..333: mol_type = other DNA
gatattcaattaactcaatctccttcttctttatctgcttctgttggtgatcgtgttactattacttgtaaagcttctcaatctgttgattctgatggtgattcttatatgaattggtatcaacaaaaacctggtaaagctcctaaattattaatttatggtgcttctaatttagaatctggtgttccttctcgtttttctggttctggttctggtactgattttactttaactatttcttctttacaacctgaagattttgctacttattattgtcaacaatatcattctcatccttatacttttggtcaaggtactaaattagaaattaaa

SEQ ID NO: 2321 - protein, 10 aa, synthetic construct
QSVDSDGDSY

SEQ ID NO: 2322 - skipped

SEQ ID NO: 2323 - protein, 9 aa, synthetic construct
QQLNIYPFT

SEQ ID NO: 2324 - protein, 111 aa, synthetic construct
DIQLTQSPSSLSASVGDRVTITCKASQSVDSDGDSYMNWYQQKPGKAPKLLIYGASNLESGVPSRFSGSGSGTDFTLTISSLQPEDFATYYCQQLNIYPFTFGQGTKLEIK

SEQ ID NO: 2325 - DNA, 333 bp, synthetic construct
  source 1..333: mol_type = other DNA
gatattcaattaactcaatctccttcttctttatctgcttctgttggtgatcgtgttactattacttgtaaagcttctcaatctgttgattctgatggtgattcttatatgaattggtatcaacaaaaacctggtaaagctcctaaattattaatttatggtgcttctaatttagaatctggtgttccttctcgtttttctggttctggttctggtactgattttactttaactatttcttctttacaacctgaagattttgctacttattattgtcaacaattaaatatttatccttttacttttggtcaaggtactaaattagaaattaaa

SEQ ID NO: 2326 - protein, 10 aa, synthetic construct
TVSHVGSYNP

SEQ ID NO: 2327 - skipped

SEQ ID NO: 2328 - protein, 9 aa, synthetic construct
QQLNNYPVT

SEQ ID NO: 2329 - protein, 111 aa, synthetic construct
DIQLTQSPSSLSASVGDRVTITCKASTVSHVGSYNPMNWYQHKPGKAPKLLIYGASNLESGVPSRFSGSGSGTDFTLTISSLQPEDFATYYCQQLNNYPVTFGQGTKLEIK

SEQ ID NO: 2330 - DNA, 333 bp, synthetic construct
  source 1..333: mol_type = other DNA
gatattcaattaactcaatctccttcttctttatctgcttctgttggtgatcgtgttactattacttgtaaagcttctactgtttctcatgttggttcttataatcctatgaattggtatcaacataaacctggtaaagctcctaaattattaatttatggtgcttctaatttagaatctggtgttccttctcgtttttctggttctggttctggtactgattttactttaactatttcttctttacaacctgaagattttgctacttattattgtcaacaattaaataattatcctgttacttttggtcaaggtactaaattagaaattaaa

SEQ ID NO: 2331 - protein, 6 aa, synthetic construct
HIISSY

SEQ ID NO: 2332 - skipped

SEQ ID NO: 2333 - protein, 9 aa, synthetic construct
QQSYSTPPT

SEQ ID NO: 2334 - protein, 107 aa, synthetic construct
DIQMTQSPSSLSASVGDRVTITCRASHIISSYLNWYQQKPGKAPKLLIYAASSLQSGVPSRFSGSGSGTDFTLTISSLQPEDFATYYCQQSYSTPPTFGQGTKVEIK

SEQ ID NO: 2335 - DNA, 321 bp, synthetic construct
  source 1..321: mol_type = other DNA
gatattcaaatgactcaatctccttcttctttatctgcttctgttggtgatcgtgttactattacttgtcgtgcttctcatattatttcttcttatttaaattggtatcaacaaaaacctggtaaagctcctaaattattaatttatgctgcttcttctttacaatctggtgttccttctcgtttttctggttctggttctggtactgattttactttaactatttcttctttacaacctgaagattttgctacttattattgtcaacaatcttattctactcctcctacttttggtcaaggtactaaagttgaaattaaa

SEQ ID NO: 2336 - protein, 10 aa, synthetic construct
ATSSDVAYYH

SEQ ID NO: 2337 - skipped

SEQ ID NO: 2338 - protein, 9 aa, synthetic construct
QEHHSYPYT

SEQ ID NO: 2339 - protein, 111 aa, synthetic construct
DIQLTQSPSSLSASVGDRVTITCKASATSSDVAYYHMNWYQQKPGKAPKLLIYGASNLESGVPSRFSGSGSGTDFTLTISSLQPEDFATYYCQEHHSYPYTFGQGTKLEIK

SEQ ID NO: 2340 - DNA, 333 bp, synthetic construct
  source 1..333: mol_type = other DNA
gatattcaattaactcaatctccttcttctttatctgcttctgttggtgatcgtgttactattacttgtaaagcttctgctacttcttctgatgttgcttattatcatatgaattggtatcaacaaaaacctggtaaagctcctaaattattaatttatggtgcttctaatttagaatctggtgttccttctcgtttttctggttctggttctggtactgattttactttaactatttcttctttacaacctgaagattttgctacttattattgtcaagaacatcattcttatccttatacttttggtcaaggtactaaattagaaattaaa

SEQ ID NO: 2341 - protein, 11 aa, synthetic construct
PQYPGSEILWQ

SEQ ID NO: 2342 - protein, 11 aa, synthetic construct
YPRGSKPEDAN

SEQ ID NO: 2343 - protein, 21 aa, synthetic construct
QDGNEEMGGITQTPYKVSISG

SEQ ID NO: 2344 - protein, 15 aa, synthetic construct
YRCNGTDIYKDKEST

SEQ ID NO: 2345 - protein, 31 aa, synthetic construct
SPQYPGSEILWQKWGNKKVSYPRGSKPEDAN

SEQ ID NO: 2346 - protein, 21 aa, synthetic construct
QDGNEEMGGITQTPYKVSGSG

SEQ ID NO: 2347 - protein, 15 aa, synthetic construct
YRSNGTDIYKDKEST

SEQ ID NO: 2348 - protein, 120 aa, synthetic construct; identical to SEQ ID NO: 84

SEQ ID NO: 2349 - protein, 107 aa, synthetic construct; identical to SEQ ID NO: 9

SEQ ID NO: 2350 - protein, 125 aa, synthetic construct; identical to SEQ ID NO: 1084

SEQ ID NO: 2351 - protein, 110 aa, synthetic construct; identical to SEQ ID NO: 669

SEQ ID NO: 2352 - protein, 742 aa, synthetic construct
EVQLVESGGGLVQPGGSLRLSCAASGFTFNTYAMNWVRQAPGKGLEWVGRIRSKYNNYATYYADSVKGRFTISRDDSKNTLYLQMNSLRAEDTAVYYCVRHGNFGNSYVSWFAYWGQGTLVTVSSGGGGSGGGGSGGGGSDIQMTQSPSSLSASVGDRVTITCRSSTGAVTTSNYANWVQQKPGKAPKGLIGGTNKRAPGVPARFSGSGSGTDFTLTISSLQPEDFATYYCALWYSNLWVFGQGTKVEIKGPGGPEPKSSDKTHTCPPCPAPEAAGGPSVFLFPPKPKDTLMISRTPEVTCVVVDVSHEDPEVKFNWYVDGVEVHNAKTKPREEQYNSTYRVVSVLTVLHQDWLNGKEYKCKVSNKALGAPIEKTISKAKGQPREPQVYTLPPSRDELTKNQVSLTCLVKGFYPSDIAVEWESNGQPENNYKTTPPVLDSDGSFFLYSKLTVDKSRWQQGNVFSCSVMHEALHNHYTQKSLSLSPGGGGSGGGGSGGGGSEVQLLESGGGLVQPGGSLRLSCAASGFTFSNYAMGWVRQAPGKGLEWVSVISSGGGGGTSYADSVKGRFTISRDNSKNTLYLQMNSLRAEDTAVYYCASPPRDYEGMDVWGQGTLVTVSSGGGGSGGGGSGGGGSDIQMTQSPSSLSASVGDRVTITCRASQQISTYLNWYQQKPGKAPKLLIYATSRLEDGVPSRFSGSGSGTDFTLTISSLQPEDFATYYCQQTYITPRTFGGGTKVEIK

SEQ ID NO: 2353 - DNA, 2226 bp, synthetic construct
  source 1..2226: mol_type = other DNA
gaggtccaactcgtggaatcaggcgggggattagtgcagcctggcggttcccttaggctctcgtgtgctgcatctggctttaccttcaatacatacgccatgaactgggtgcgtcaggcacccggaaagggattggagtgggtcggacgcattcgcagcaagtacaataactacgccacttactacgctgattccgtgaaaggccgattcacaatcagccgggacgatagcaaaaacaccctgtatctgcagatgaatagtctgagggccgaagacacagccgtgtactattgcgttcggcacgggaactttggcaattcttatgtatcctggttcgcctactgggggcagggcactctggtcaccgtttctagtggtggaggcgggagtggaggtggcggcagtggtggcggcggaagcgatatacaaatgacacagtctccctcttccctctctgcctcagtcggcgatcgcgtgacaattacatgtagatcctccactggcgccgtgacaaccagcaattacgctaactgggtacagcagaagcctggcaaggcacccaaaggccttattggcgggactaataaacgggcacctggagtcccagccaggttctcgggaagtgggagcgggactgactttaccctgaccatctcaagcttacagccagaggacttcgctacgtattactgcgcgttgtggtatagcaatctgtgggtgtttgggcaagggaccaaggtggagatcaaaggtccgggaggccccgagcccaaatcttctgacaaaactcacacatgcccaccgtgcccagcacctgaagcagcggggggaccgtcagtcttcctcttccccccaaaacccaaggacaccctcatgatctcccggacccctgaggtcacatgcgtggtggtggacgtgagccacgaagaccctgaggtcaagttcaactggtacgtggacggcgtggaggtgcataatgccaagacaaagccgcgggaggagcagtacaacagcacgtaccgtgtggtcagcgtcctcaccgtcctgcaccaggactggctgaatggcaaggagtacaagtgcaaggtgtccaacaaagccctcggagcccccatcgagaaaaccatctccaaagccaaagggcagccccgagaaccacaggtgtacaccctgcccccatcccgggatgagctgaccaagaaccaggtcagcctgacctgcctggtcaaaggcttctatcccagcgacatcgccgtggagtgggagagcaatgggcagccggagaacaactacaagaccacgcctcccgtgctggactccgacggctccttcttcctctatagcaagctcaccgtggacaagagcagatggcagcaggggaacgtcttctcatgctccgtgatgcatgaggctctgcacaaccactacacgcagaaaagtctctccctgtctccgggtggcggtggatcgggcggtggtggatctggaggaggtggctcggaggtgcagctcttagaaagcggaggtggcttggttcagcctggcggtagtctaagactgtcctgtgcagcttctggcttcacctttagcaactatgcgatgggttgggtccgtcaagcaccaggtaagggtctggaatgggtgtctgtcatctcttccggtggcggtggtggaacctcttatgccgatagcgtgaaaggacgcttcaccatcagcagggacaattccaagaacacgctgtacctgcaaatgaacagcctgcgagccgaggatacggccgtgtattactgtgcttcacctcctcgagactacgagggcatggatgtttggggccagggaaccctggtcaccgtctcctcaggtggcggtggatcaggaggtggaggatctggaggaggtggcagcgatattcagatgacccagagcccatcctccctgtcagcttctgtaggagaccgcgttaccatcacctgtcgtgccagccaacagatttccacttacctgaactggtatcagcagaagcctggtaaggcaccgaagctgctgatctatgccaccagccgtctggaagatggcgtcccgtcacgctttagtggctctggttctgggaccgacttcactctcaccattagcagtctgcaaccggaggacttcgcgacatactattgccagcagacatatatcaccccgcgcacctttggaggcggtaccaaggtggagatcaaa

SEQ ID NO: 2354 - protein, 250 aa, synthetic construct
EVQLVESGGGLVQPGGSLRLSCAASGFTFNTYAMNWVRQAPGKGLEWVGRIRSKYNNYATYYADSVKGRFTISRDDSKNTLYLQMNSLRAEDTAVYYCVRHGNFGNSYVSWFAYWGQGTLVTVSSGGGGSGGGGSGGGGSDIQMTQSPSSLSASVGDRVTITCRSSTGAVTTSNYANWVQQKPGKAPKGLIGGTNKRAPGVPARFSGSGSGTDFTLTISSLQPEDFATYYCALWYSNLWVFGQGTKVEIK

SEQ ID NO: 2355 - DNA, 750 bp, synthetic construct
  source 1..750: mol_type = other DNA
gaggtccaactcgtggaatcaggcgggggattagtgcagcctggcggttcccttaggctctcgtgtgctgcatctggctttaccttcaatacatacgccatgaactgggtgcgtcaggcacccggaaagggattggagtgggtcggacgcattcgcagcaagtacaataactacgccacttactacgctgattccgtgaaaggccgattcacaatcagccgggacgatagcaaaaacaccctgtatctgcagatgaatagtctgagggccgaagacacagccgtgtactattgcgttcggcacgggaactttggcaattcttatgtatcctggttcgcctactgggggcagggcactctggtcaccgtttctagtggtggaggcgggagtggaggtggcggcagtggtggcggcggaagcgatatacaaatgacacagtctccctcttccctctctgcctcagtcggcgatcgcgtgacaattacatgtagatcctccactggcgccgtgacaaccagcaattacgctaactgggtacagcagaagcctggcaaggcacccaaaggccttattggcgggactaataaacgggcacctggagtcccagccaggttctcgggaagtgggagcgggactgactttaccctgaccatctcaagcttacagccagaggacttcgctacgtattactgcgcgttgtggtatagcaatctgtgggtgtttgggcaagggaccaaggtggagatcaaa

SEQ ID NO: 2356 - protein, 250 aa, synthetic construct
GPGGPEPKSSDKTHTCPPCPAPEAAGGPSVFLFPPKPKDTLMISRTPEVTCVVVDVSHEDPEVKFNWYVDGVEVHNAKTKPREEQYNSTYRVVSVLTVLHQDWLNGKEYKCKVSNKALGAPIEKTISKAKGQPREPQVYTLPPSRDELTKNQVSLTCLVKGFYPSDIAVEWESNGQPENNYKTTPPVLDSDGSFFLYSKLTVDKSRWQQGNVFSCSVMHEALHNHYTQKSLSLSPGGGGSGGGGSGGGGS

SEQ ID NO: 2357 - DNA, 750 bp, synthetic construct
  source 1..750: mol_type = other DNA
ggtccgggaggccccgagcccaaatcttctgacaaaactcacacatgcccaccgtgcccagcacctgaagcagcggggggaccgtcagtcttcctcttccccccaaaacccaaggacaccctcatgatctcccggacccctgaggtcacatgcgtggtggtggacgtgagccacgaagaccctgaggtcaagttcaactggtacgtggacggcgtggaggtgcataatgccaagacaaagccgcgggaggagcagtacaacagcacgtaccgtgtggtcagcgtcctcaccgtcctgcaccaggactggctgaatggcaaggagtacaagtgcaaggtgtccaacaaagccctcggagcccccatcgagaaaaccatctccaaagccaaagggcagccccgagaaccacaggtgtacaccctgcccccatcccgggatgagctgaccaagaaccaggtcagcctgacctgcctggtcaaaggcttctatcccagcgacatcgccgtggagtgggagagcaatgggcagccggagaacaactacaagaccacgcctcccgtgctggactccgacggctccttcttcctctatagcaagctcaccgtggacaagagcagatggcagcaggggaacgtcttctcatgctccgtgatgcatgaggctctgcacaaccactacacgcagaaaagtctctccctgtctccgggtggcggtggatcgggcggtggtggatctggaggaggtggctcg

SEQ ID NO: 2358 - protein, 242 aa, synthetic construct
EVQLLESGGGLVQPGGSLRLSCAASGFTFSNYAMGWVRQAPGKGLEWVSVISSGGGGGTSYADSVKGRFTISRDNSKNTLYLQMNSLRAEDTAVYYCASPPRDYEGMDVWGQGTLVTVSSGGGGSGGGGSGGGGSDIQMTQSPSSLSASVGDRVTITCRASQQISTYLNWYQQKPGKAPKLLIYATSRLEDGVPSRFSGSGSGTDFTLTISSLQPEDFATYYCQQTYITPRTFGGGTKVEIK

SEQ ID NO: 2359 - DNA, 726 bp, synthetic construct
  source 1..726: mol_type = other DNA
gaggtgcagctcttagaaagcggaggtggcttggttcagcctggcggtagtctaagactgtcctgtgcagcttctggcttcacctttagcaactatgcgatgggttgggtccgtcaagcaccaggtaagggtctggaatgggtgtctgtcatctcttccggtggcggtggtggaacctcttatgccgatagcgtgaaaggacgcttcaccatcagcagggacaattccaagaacacgctgtacctgcaaatgaacagcctgcgagccgaggatacggccgtgtattactgtgcttcacctcctcgagactacgagggcatggatgtttggggccagggaaccctggtcaccgtctcctcaggtggcggtggatcaggaggtggaggatctggaggaggtggcagcgatattcagatgacccagagcccatcctccctgtcagcttctgtaggagaccgcgttaccatcacctgtcgtgccagccaacagatttccacttacctgaactggtatcagcagaagcctggtaaggcaccgaagctgctgatctatgccaccagccgtctggaagatggcgtcccgtcacgctttagtggctctggttctgggaccgacttcactctcaccattagcagtctgcaaccggaggacttcgcgacatactattgccagcagacatatatcaccccgcgcacctttggaggcggtaccaaggtggagatcaaa

SEQ ID NO: 2360 - protein, 742 aa, synthetic construct
EVQLVESGGGLVQPGGSLRLSCAASGFTFNTYAMNWVRQAPGKGLEWVGRIRSKYNNYATYYADSVKGRFTISRDDSKNTLYLQMNSLRAEDTAVYYCVRHGNFGNSYVSWFAYWGQGTLVTVSSGGGGSGGGGSGGGGSDIQMTQSPSSLSASVGDRVTITCRSSTGAVTTSNYANWVQQKPGKAPKGLIGGTNKRAPGVPARFSGSGSGTDFTLTISSLQPEDFATYYCAAWHDNAWVFGQGTKVEIKGPGGPEPKSSDKTHTCPPCPAPEAAGGPSVFLFPPKPKDTLMISRTPEVTCVVVDVSHEDPEVKFNWYVDGVEVHNAKTKPREEQYNSTYRVVSVLTVLHQDWLNGKEYKCKVSNKALGAPIEKTISKAKGQPREPQVYTLPPSRDELTKNQVSLTCLVKGFYPSDIAVEWESNGQPENNYKTTPPVLDSDGSFFLYSKLTVDKSRWQQGNVFSCSVMHEALHNHYTQKSLSLSPGGGGSGGGGSGGGGSEVQLLESGGGLVQPGGSLRLSCAASGFTFSNYAMGWVRQAPGKGLEWVSVISSGGGGGTSYADSVKGRFTISRDNSKNTLYLQMNSLRAEDTAVYYCASPPRDYEGMDVWGQGTLVTVSSGGGGSGGGGSGGGGSDIQMTQSPSSLSASVGDRVTITCRASQQISTYLNWYQQKPGKAPKLLIYATSRLEDGVPSRFSGSGSGTDFTLTISSLQPEDFATYYCQQTYITPRTFGGGTKVEIK

SEQ ID NO: 2361 - DNA, 2226 bp, synthetic construct
  source 1..2226: mol_type = other DNA
gaggtccaactcgtggaatcaggcgggggattagtgcagcctggcggttcccttaggctctcgtgtgctgcatctggctttaccttcaatacatacgccatgaactgggtgcgtcaggcacccggaaagggattggagtgggtcggacgcattcgcagcaagtacaataactacgccacttactacgctgattccgtgaaaggccgattcacaatcagccgggacgatagcaaaaacaccctgtatctgcagatgaatagtctgagggccgaagacacagccgtgtactattgcgttcggcacgggaactttggcaattcttatgtatcctggttcgcctactgggggcagggcactctggtcaccgtttctagtggtggaggcgggagtggaggtggcggcagtggtggcggcggaagcgatatacaaatgacacagtctccctcttccctctctgcctcagtcggcgatcgcgtgacaattacatgtagatcctccactggtgccgttaccacatccaactacgctaactgggtacagcagaagcctggcaaggcacccaaaggccttattggcgggactaataaacgggcacctggagtcccagccaggttctcgggaagtgggagcgggactgactttaccctgaccatctcaagcttacagccagaggacttcgctacgtattactgcgccgcatggcacgacaacgcttgggtgtttgggcaagggaccaaggtggagatcaaaggtccgggaggccccgagcccaaatcttctgacaaaactcacacatgcccaccgtgcccagcacctgaagcagcggggggaccgtcagtcttcctcttccccccaaaacccaaggacaccctcatgatctcccggacccctgaggtcacatgcgtggtggtggacgtgagccacgaagaccctgaggtcaagttcaactggtacgtggacggcgtggaggtgcataatgccaagacaaagccgcgggaggagcagtacaacagcacgtaccgtgtggtcagcgtcctcaccgtcctgcaccaggactggctgaatggcaaggagtacaagtgcaaggtgtccaacaaagccctcggagcccccatcgagaaaaccatctccaaagccaaagggcagccccgagaaccacaggtgtacaccctgcccccatcccgggatgagctgaccaagaaccaggtcagcctgacctgcctggtcaaaggcttctatcccagcgacatcgccgtggagtgggagagcaatgggcagccggagaacaactacaagaccacgcctcccgtgctggactccgacggctccttcttcctctatagcaagctcaccgtggacaagagcagatggcagcaggggaacgtcttctcatgctccgtgatgcatgaggctctgcacaaccactacacgcagaaaagtctctccctgtctccgggtggcggtggatcgggcggtggtggatctggaggaggtggctcggaggtgcagctcttagaaagcggaggtggcttggttcagcctggcggtagtctaagactgtcctgtgcagcttctggcttcacctttagcaactatgcgatgggttgggtccgtcaagcaccaggtaagggtctggaatgggtgtctgtcatctcttccggtggcggtggtggaacctcttatgccgatagcgtgaaaggacgcttcaccatcagcagggacaattccaagaacacgctgtacctgcaaatgaacagcctgcgagccgaggatacggccgtgtattactgtgcttcacctcctcgagactacgagggcatggatgtttggggccagggaaccctggtcaccgtctcctcaggtggcggtggatcaggaggtggaggatctggaggaggtggcagcgatattcagatgacccagagcccatcctccctgtcagcttctgtaggagaccgcgttaccatcacctgtcgtgccagccaacagatttccacttacctgaactggtatcagcagaagcctggtaaggcaccgaagctgctgatctatgccaccagccgtctggaagatggcgtcccgtcacgctttagtggctctggttctgggaccgacttcactctcaccattagcagtctgcaaccggaggacttcgcgacatactattgccagcagacatatatcaccccgcgcacctttggaggcggtaccaaggtggagatcaaa

SEQ ID NO: 2362 - protein, 250 aa, synthetic construct
EVQLVESGGGLVQPGGSLRLSCAASGFTFNTYAMNWVRQAPGKGLEWVGRIRSKYNNYATYYADSVKGRFTISRDDSKNTLYLQMNSLRAEDTAVYYCVRHGNFGNSYVSWFAYWGQGTLVTVSSGGGGSGGGGSGGGGSDIQMTQSPSSLSASVGDRVTITCRSSTGAVTTSNYANWVQQKPGKAPKGLIGGTNKRAPGVPARFSGSGSGTDFTLTISSLQPEDFATYYCAAWHDNAWVFGQGTKVEIK

SEQ ID NO: 2363 - DNA, 750 bp, synthetic construct
  source 1..750: mol_type = other DNA
gaggtccaactcgtggaatcaggcgggggattagtgcagcctggcggttcccttaggctctcgtgtgctgcatctggctttaccttcaatacatacgccatgaactgggtgcgtcaggcacccggaaagggattggagtgggtcggacgcattcgcagcaagtacaataactacgccacttactacgctgattccgtgaaaggccgattcacaatcagccgggacgatagcaaaaacaccctgtatctgcagatgaatagtctgagggccgaagacacagccgtgtactattgcgttcggcacgggaactttggcaattcttatgtatcctggttcgcctactgggggcagggcactctggtcaccgtttctagtggtggaggcgggagtggaggtggcggcagtggtggcggcggaagcgatatacaaatgacacagtctccctcttccctctctgcctcagtcggcgatcgcgtgacaattacatgtagatcctccactggtgccgttaccacatccaactacgctaactgggtacagcagaagcctggcaaggcacccaaaggccttattggcgggactaataaacgggcacctggagtcccagccaggttctcgggaagtgggagcgggactgactttaccctgaccatctcaagcttacagccagaggacttcgctacgtattactgcgccgcatggcacgacaacgcttgggtgtttgggcaagggaccaaggtggagatcaaa

SEQ ID NO: 2364 - protein, 250 aa, synthetic construct; identical to SEQ ID NO: 2356

SEQ ID NO: 2365 - DNA, 750 bp, synthetic construct; identical to SEQ ID NO: 2357
  source 1..750: mol_type = other DNA

SEQ ID NO: 2366 - protein, 242 aa, synthetic construct; identical to SEQ ID NO: 2358

SEQ ID NO: 2367 - DNA, 726 bp, synthetic construct; identical to SEQ ID NO: 2359
  source 1..726: mol_type = other DNA

SEQ ID NO: 2368 - protein, 742 aa, synthetic construct
EVQLVESGGGLVQPGGSLRLSCAASGFTFETYAMNWVRQAPGKGLEWVGRIRSKYNNYATYYADSVKGRFTISRDDSKNTLYLQMNSLRAEDTAVYYCVRHGNFGNSYVSWFAYWGQGTLVTVSSGGGGSGGGGSGGGGSDIQMTQSPSSLSASVGDRVTITCRSSTGAVTTSNYANWVQQKPGKAPKGLIGGTYKRAPGVPARFSGSGSGTDFTLTISSLQPEDFATYYCVIWHSGAWVFGQGTKVEIKGPGGPEPKSSDKTHTCPPCPAPEAAGGPSVFLFPPKPKDTLMISRTPEVTCVVVDVSHEDPEVKFNWYVDGVEVHNAKTKPREEQYNSTYRVVSVLTVLHQDWLNGKEYKCKVSNKALGAPIEKTISKAKGQPREPQVYTLPPSRDELTKNQVSLTCLVKGFYPSDIAVEWESNGQPENNYKTTPPVLDSDGSFFLYSKLTVDKSRWQQGNVFSCSVMHEALHNHYTQKSLSLSPGGGGSGGGGSGGGGSEVQLLESGGGLVQPGGSLRLSCAASGFTFSNYAMGWVRQAPGKGLEWVSVISSGGGGGTSYADSVKGRFTISRDNSKNTLYLQMNSLRAEDTAVYYCASPPRDYEGMDVWGQGTLVTVSSGGGGSGGGGSGGGGSDIQMTQSPSSLSASVGDRVTITCRASQQISTYLNWYQQKPGKAPKLLIYATSRLEDGVPSRFSGSGSGTDFTLTISSLQPEDFATYYCQQTYITPRTFGGGTKVEIK

SEQ ID NO: 2369 - DNA, 2226 bp, synthetic construct
  source 1..2226: mol_type = other DNA
gaggtccaactcgtggaatcaggcgggggattagtgcagcctggcggttcccttaggctctcgtgtgctgcatctggctttaccttcgagacatacgccatgaactgggtgcgtcaggcacccggaaagggattggagtgggtcggacgcattcgcagcaagtacaataactacgccacttactacgctgattccgtgaaaggccgattcacaatcagccgggacgatagcaaaaacaccctgtatctgcagatgaatagtctgagggccgaagacacagccgtgtactattgcgttcggcacgggaactttggcaattcttatgtatcctggttcgcctactgggggcagggcactctggtcaccgtttctagtggtggaggcgggagtggaggtggcggcagtggtggcggcggaagcgatatacaaatgacacagtctccctcttccctctctgcctcagtcggcgatcgcgtgacaattacatgtagatcctccactggtgccgttaccacatccaactacgctaactgggtacagcagaagcctggcaaggcacccaaaggccttattggcgggacttataaacgggcacctggagtcccagccaggttctcgggaagtgggagcgggactgactttaccctgaccatctcaagcttacagccagaggacttcgctacgtattactgcgtcatctggcacagcggcgcctgggtgtttgggcaagggaccaaggtggagatcaaaggtccgggaggccccgagcccaaatcttctgacaaaactcacacatgcccaccgtgcccagcacctgaagcagcggggggaccgtcagtcttcctcttccccccaaaacccaaggacaccctcatgatctcccggacccctgaggtcacatgcgtggtggtggacgtgagccacgaagaccctgaggtcaagttcaactggtacgtggacggcgtggaggtgcataatgccaagacaaagccgcgggaggagcagtacaacagcacgtaccgtgtggtcagcgtcctcaccgtcctgcaccaggactggctgaatggcaaggagtacaagtgcaaggtgtccaacaaagccctcggagcccccatcgagaaaaccatctccaaagccaaagggcagccccgagaaccacaggtgtacaccctgcccccatcccgggatgagctgaccaagaaccaggtcagcctgacctgcctggtcaaaggcttctatcccagcgacatcgccgtggagtgggagagcaatgggcagccggagaacaactacaagaccacgcctcccgtgctggactccgacggctccttcttcctctatagcaagctcaccgtggacaagagcagatggcagcaggggaacgtcttctcatgctccgtgatgcatgaggctctgcacaaccactacacgcagaaaagtctctccctgtctccgggtggcggtggatcgggcggtggtggatctggaggaggtggctcggaggtgcagctcttagaaagcggaggtggcttggttcagcctggcggtagtctaagactgtcctgtgcagcttctggcttcacctttagcaactatgcgatgggttgggtccgtcaagcaccaggtaagggtctggaatgggtgtctgtcatctcttccggtggcggtggtggaacctcttatgccgatagcgtgaaaggacgcttcaccatcagcagggacaattccaagaacacgctgtacctgcaaatgaacagcctgcgagccgaggatacggccgtgtattactgtgcttcacctcctcgagactacgagggcatggatgtttggggccagggaaccctggtcaccgtctcctcaggtggcggtggatcaggaggtggaggatctggaggaggtggcagcgatattcagatgacccagagcccatcctccctgtcagcttctgtaggagaccgcgttaccatcacctgtcgtgccagccaacagatttccacttacctgaactggtatcagcagaagcctggtaaggcaccgaagctgctgatctatgccaccagccgtctggaagatggcgtcccgtcacgctttagtggctctggttctgggaccgacttcactctcaccattagcagtctgcaaccggaggacttcgcgacatactattgccagcagacatatatcaccccgcgcacctttggaggcggtaccaaggtggagatcaaa

SEQ ID NO: 2370 - protein, 250 aa, synthetic construct
EVQLVESGGGLVQPGGSLRLSCAASGFTFETYAMNWVRQAPGKGLEWVGRIRSKYNNYATYYADSVKGRFTISRDDSKNTLYLQMNSLRAEDTAVYYCVRHGNFGNSYVSWFAYWGQGTLVTVSSGGGGSGGGGSGGGGSDIQMTQSPSSLSASVGDRVTITCRSSTGAVTTSNYANWVQQKPGKAPKGLIGGTYKRAPGVPARFSGSGSGTDFTLTISSLQPEDFATYYCVIWHSGAWVFGQGTKVEIK

SEQ ID NO: 2371 - DNA, 750 bp, synthetic construct
  source 1..750: mol_type = other DNA
gaggtccaactcgtggaatcaggcgggggattagtgcagcctggcggttcccttaggctctcgtgtgctgcatctggctttaccttcgagacatacgccatgaactgggtgcgtcaggcacccggaaagggattggagtgggtcggacgcattcgcagcaagtacaataactacgccacttactacgctgattccgtgaaaggccgattcacaatcagccgggacgatagcaaaaacaccctgtatctgcagatgaatagtctgagggccgaagacacagccgtgtactattgcgttcggcacgggaactttggcaattcttatgtatcctggttcgcctactgggggcagggcactctggtcaccgtttctagtggtggaggcgggagtggaggtggcggcagtggtggcggcggaagcgatatacaaatgacacagtctccctcttccctctctgcctcagtcggcgatcgcgtgacaattacatgtagatcctccactggtgccgttaccacatccaactacgctaactgggtacagcagaagcctggcaaggcacccaaaggccttattggcgggacttataaacgggcacctggagtcccagccaggttctcgggaagtgggagcgggactgactttaccctgaccatctcaagcttacagccagaggacttcgctacgtattactgcgtcatctggcacagcggcgcctgggtgtttgggcaagggaccaaggtggagatcaaa

SEQ ID NO: 2372 - protein, 250 aa, synthetic construct; identical to SEQ ID NO: 2356

SEQ ID NO: 2373 - DNA, 750 bp, synthetic construct; identical to SEQ ID NO: 2357
  source 1..750: mol_type = other DNA

SEQ ID NO: 2374 - protein, 242 aa, synthetic construct; identical to SEQ ID NO: 2358

SEQ ID NO: 2375 - DNA, 726 bp, synthetic construct; identical to SEQ ID NO: 2359
  source 1..726: mol_type = other DNA

SEQ ID NO: 2376 - protein, 742 aa, synthetic construct
EVQLVESGGGLVQPGGSLRLSCAASGFTFNTYAMNWVRQAPGKGLEWVGRIRSKYNNYATYYADSVKGRFTISRDDSKNTLYLQMNSLRAEDTAVYYCVRHGNFGNSYVSWFAYWGQGTLVTVSSGGGGSGGGGSGGGGSDIQMTQSPSSLSASVGDRVTITCRSSTGTVTTSNYANWVQQKPGKAPKGLIGGTNKRAPGVPARFSGSGSGTDFTLTISSLQPEDFATYYCALWYSNLWVFGQGTKVEIKGPGGPEPKSSDKTHTCPPCPAPEAAGGPSVFLFPPKPKDTLMISRTPEVTCVVVDVSHEDPEVKFNWYVDGVEVHNAKTKPREEQYNSTYRVVSVLTVLHQDWLNGKEYKCKVSNKALGAPIEKTISKAKGQPREPQVYTLPPSRDELTKNQVSLTCLVKGFYPSDIAVEWESNGQPENNYKTTPPVLDSDGSFFLYSKLTVDKSRWQQGNVFSCSVMHEALHNHYTQKSLSLSPGGGGSGGGGSGGGGSEVQLLESGGGLVQPGGSLRLSCAASGFTFSNYAMGWVRQAPGKGLEWVSVISSGGGGGTSYADSVKGRFTISRDNSKNTLYLQMNSLRAEDTAVYYCASPPRDYEGMDVWGQGTLVTVSSGGGGSGGGGSGGGGSDIQMTQSPSSLSASVGDRVTITCRASQQISTYLNWYQQKPGKAPKLLIYATSRLEDGVPSRFSGSGSGTDFTLTISSLQPEDFATYYCQQTYITPRTFGGGTKVEIK

SEQ ID NO: 2377 - DNA, 2226 bp, synthetic construct
  source 1..2226: mol_type = other DNA
gaggtccaactcgtggaatcaggcgggggattagtgcagcctggcggttcccttaggctctcgtgtgctgcatctggctttaccttcaatacatacgccatgaactgggtgcgtcaggcacccggaaagggattggagtgggtcggacgcattcgcagcaagtacaataactacgccacttactacgctgattccgtgaaaggccgattcacaatcagccgggacgatagcaaaaacaccctgtatctgcagatgaatagtctgagggccgaagacacagccgtgtactattgcgttcggcacgggaactttggcaattcttatgtatcctggttcgcctactgggggcagggcactctggtcaccgtttctagtggtggcggtggatcgggcggtggtggatctggaggaggtggctcggatatacaaatgacacagtctccctcttccctctctgcctcagtcggcgatcgcgtgacaattacatgtagatcctccactggcaccgtgaccacaagcaactacgctaactgggtacagcagaagcctggcaaggcacccaaaggccttattggcggcaccaacaaacgggcacctggagtcccagccaggttctcgggaagtgggagcgggactgactttaccctgaccatctcaagcttacagccagaggacttcgctacgtattactgcgccctctggtacagcaacctgtgggtgtttgggcaagggaccaaggtggagatcaaaggtccgggaggccccgagcccaaatcttctgacaaaactcacacatgcccaccgtgcccagcacctgaagcagcggggggaccgtcagtcttcctcttccccccaaaacccaaggacaccctcatgatctcccggacccctgaggtcacatgcgtggtggtggacgtgagccacgaagaccctgaggtcaagttcaactggtacgtggacggcgtggaggtgcataatgccaagacaaagccgcgggaggagcagtacaacagcacgtaccgtgtggtcagcgtcctcaccgtcctgcaccaggactggctgaatggcaaggagtacaagtgcaaggtgtccaacaaagccctcggagcccccatcgagaaaaccatctccaaagccaaagggcagccccgagaaccacaggtgtacaccctgcccccatcccgggatgagctgaccaagaaccaggtcagcctgacctgcctggtcaaaggcttctatcccagcgacatcgccgtggagtgggagagcaatgggcagccggagaacaactacaagaccacgcctcccgtgctggactccgacggctccttcttcctctatagcaagctcaccgtggacaagagcagatggcagcaggggaacgtcttctcatgctccgtgatgcatgaggctctgcacaaccactacacgcagaaaagtctctccctgtctccgggtggcggtggatcgggcggtggtggatctggaggaggtggctcggaggtgcagctcttagaaagcggaggtggcttggttcagcctggcggtagtctaagactgtcctgtgcagcttctggcttcacctttagcaactatgcgatgggttgggtccgtcaagcaccaggtaagggtctggaatgggtgtctgtcatctcttccggtggcggtggtggaacctcttatgccgatagcgtgaaaggacgcttcaccatcagcagggacaattccaagaacacgctgtacctgcaaatgaacagcctgcgagccgaggatacggccgtgtattactgtgcttcacctcctcgagactacgagggcatggatgtttggggccagggaaccctggtcaccgtctcctcaggtggcggtggatcaggaggtggaggatctggaggaggtggcagcgatattcagatgacccagagcccatcctccctgtcagcttctgtaggagaccgcgttaccatcacctgtcgtgccagccaacagatttccacttacctgaactggtatcagcagaagcctggtaaggcaccgaagctgctgatctatgccaccagccgtctggaagatggcgtcccgtcacgctttagtggctctggttctgggaccgacttcactctcaccattagcagtctgcaaccggaggacttcgcgacatactattgccagcagacatatatcaccccgcgcacctttggaggcggtaccaaggtggagatcaaa

SEQ ID NO: 2378 - protein, 250 aa, synthetic construct
EVQLVESGGGLVQPGGSLRLSCAASGFTFNTYAMNWVRQAPGKGLEWVGRIRSKYNNYATYYADSVKGRFTISRDDSKNTLYLQMNSLRAEDTAVYYCVRHGNFGNSYVSWFAYWGQGTLVTVSSGGGGSGGGGSGGGGSDIQMTQSPSSLSASVGDRVTITCRSSTGTVTTSNYANWVQQKPGKAPKGLIGGTNKRAPGVPARFSGSGSGTDFTLTISSLQPEDFATYYCALWYSNLWVFGQGTKVEIK

SEQ ID NO: 2379 - DNA, 750 bp, synthetic construct
  source 1..750: mol_type = other DNA
gaggtccaactcgtggaatcaggcgggggattagtgcagcctggcggttcccttaggctctcgtgtgctgcatctggctttaccttcaatacatacgccatgaactgggtgcgtcaggcacccggaaagggattggagtgggtcggacgcattcgcagcaagtacaataactacgccacttactacgctgattccgtgaaaggccgattcacaatcagccgggacgatagcaaaaacaccctgtatctgcagatgaatagtctgagggccgaagacacagccgtgtactattgcgttcggcacgggaactttggcaattcttatgtatcctggttcgcctactgggggcagggcactctggtcaccgtttctagtggtggcggtggatcgggcggtggtggatctggaggaggtggctcggatatacaaatgacacagtctccctcttccctctctgcctcagtcggcgatcgcgtgacaattacatgtagatcctccactggcaccgtgaccacaagcaactacgctaactgggtacagcagaagcctggcaaggcacccaaaggccttattggcggcaccaacaaacgggcacctggagtcccagccaggttctcgggaagtgggagcgggactgactttaccctgaccatctcaagcttacagccagaggacttcgctacgtattactgcgccctctggtacagcaacctgtgggtgtttgggcaagggaccaaggtggagatcaaa

SEQ ID NO: 2380 - protein, 250 aa, synthetic construct; identical to SEQ ID NO: 2356

SEQ ID NO: 2381 - DNA, 750 bp, synthetic construct; identical to SEQ ID NO: 2357
  source 1..750: mol_type = other DNA

SEQ ID NO: 2382 - protein, 242 aa, synthetic construct; identical to SEQ ID NO: 2358

SEQ ID NO: 2383 - DNA, 726 bp, synthetic construct; identical to SEQ ID NO: 2359
  source 1..726: mol_type = other DNA

SEQ ID NO: 2384 - protein, 742 aa, synthetic construct
EVQLVESGGGLVQPGGSLRLSCAASGFTFNTYAMNWVRQAPGKGLEWVGRIRSKYNNYATYYADSVKGRFTISRDDSKNTLYLQMNSLRAEDTAVYYCVRHGNFGNSYVSWFAYWGQGTLVTVSSGGGGSGGGGSGGGGSDIQMTQSPSSLSASVGDRVTITCRSSTGAVTNSNYANWVQQKPGKAPKGLIGGTNKRAPGVPARFSGSGSGTDFTLTISSLQPEDFATYYCALWYSNLWVFGQGTKVEIKGPGGPEPKSSDKTHTCPPCPAPEAAGGPSVFLFPPKPKDTLMISRTPEVTCVVVDVSHEDPEVKFNWYVDGVEVHNAKTKPREEQYNSTYRVVSVLTVLHQDWLNGKEYKCKVSNKALGAPIEKTISKAKGQPREPQVYTLPPSRDELTKNQVSLTCLVKGFYPSDIAVEWESNGQPENNYKTTPPVLDSDGSFFLYSKLTVDKSRWQQGNVFSCSVMHEALHNHYTQKSLSLSPGGGGSGGGGSGGGGSEVQLLESGGGLVQPGGSLRLSCAASGFTFSNYAMGWVRQAPGKGLEWVSVISSGGGGGTSYADSVKGRFTISRDNSKNTLYLQMNSLRAEDTAVYYCASPPRDYEGMDVWGQGTLVTVSSGGGGSGGGGSGGGGSDIQMTQSPSSLSASVGDRVTITCRASQQISTYLNWYQQKPGKAPKLLIYATSRLEDGVPSRFSGSGSGTDFTLTISSLQPEDFATYYCQQTYITPRTFGGGTKVEIK

SEQ ID NO: 2385 - DNA, 2226 bp, synthetic construct
  source 1..2226: mol_type = other DNA
gaggtccaactcgtggaatcaggcgggggattagtgcagcctggcggttcccttaggctctcgtgtgctgcatctggctttaccttcaatacatacgccatgaactgggtgcgtcaggcacccggaaagggattggagtgggtcggacgcattcgcagcaagtacaataactacgccacttactacgctgattccgtgaaaggccgattcacaatcagccgggacgatagcaaaaacaccctgtatctgcagatgaatagtctgagggccgaagacacagccgtgtactattgcgttcggcacgggaactttggcaattcttatgtatcctggttcgcctactgggggcagggcactctggtcaccgtttctagtggtggcggtggatcgggcggtggtggatctggaggaggtggctcggatatacaaatgacacagtctccctcttccctctctgcctcagtcggcgatcgcgtgacaattacatgtagatcctccacaggcgctgtgaccaatagcaactacgctaactgggtacagcagaagcctggcaaggcacccaaaggccttattggcggcacaaacaaacgggcacctggagtcccagccaggttctcgggaagtgggagcgggactgactttaccctgaccatctcaagcttacagccagaggacttcgctacgtattactgcgccctctggtacagcaacctgtgggtgtttgggcaagggaccaaggtggagatcaaaggtccgggaggccccgagcccaaatcttctgacaaaactcacacatgcccaccgtgcccagcacctgaagcagcggggggaccgtcagtcttcctcttccccccaaaacccaaggacaccctcatgatctcccggacccctgaggtcacatgcgtggtggtggacgtgagccacgaagaccctgaggtcaagttcaactggtacgtggacggcgtggaggtgcataatgccaagacaaagccgcgggaggagcagtacaacagcacgtaccgtgtggtcagcgtcctcaccgtcctgcaccaggactggctgaatggcaaggagtacaagtgcaaggtgtccaacaaagccctcggagcccccatcgagaaaaccatctccaaagccaaagggcagccccgagaaccacaggtgtacaccctgcccccatcccgggatgagctgaccaagaaccaggtcagcctgacctgcctggtcaaaggcttctatcccagcgacatcgccgtggagtgggagagcaatgggcagccggagaacaactacaagaccacgcctcccgtgctggactccgacggctccttcttcctctatagcaagctcaccgtggacaagagcagatggcagcaggggaacgtcttctcatgctccgtgatgcatgaggctctgcacaaccactacacgcagaaaagtctctccctgtctccgggtggcggtggatcgggcggtggtggatctggaggaggtggctcggaggtgcagctcttagaaagcggaggtggcttggttcagcctggcggtagtctaagactgtcctgtgcagcttctggcttcacctttagcaactatgcgatgggttgggtccgtcaagcaccaggtaagggtctggaatgggtgtctgtcatctcttccggtggcggtggtggaacctcttatgccgatagcgtgaaaggacgcttcaccatcagcagggacaattccaagaacacgctgtacctgcaaatgaacagcctgcgagccgaggatacggccgtgtattactgtgcttcacctcctcgagactacgagggcatggatgtttggggccagggaaccctggtcaccgtctcctcaggtggcggtggatcaggaggtggaggatctggaggaggtggcagcgatattcagatgacccagagcccatcctccctgtcagcttctgtaggagaccgcgttaccatcacctgtcgtgccagccaacagatttccacttacctgaactggtatcagcagaagcctggtaaggcaccgaagctgctgatctatgccaccagccgtctggaagatggcgtcccgtcacgctttagtggctctggttctgggaccgacttcactctcaccattagcagtctgcaaccggaggacttcgcgacatactattgccagcagacatatatcaccccgcgcacctttggaggcggtaccaaggtggagatcaaa

SEQ ID NO: 2386 - protein, 250 aa, synthetic construct
EVQLVESGGGLVQPGGSLRLSCAASGFTFNTYAMNWVRQAPGKGLEWVGRIRSKYNNYATYYADSVKGRFTISRDDSKNTLYLQMNSLRAEDTAVYYCVRHGNFGNSYVSWFAYWGQGTLVTVSSGGGGSGGGGSGGGGSDIQMTQSPSSLSASVGDRVTITCRSSTGAVTNSNYANWVQQKPGKAPKGLIGGTNKRAPGVPARFSGSGSGTDFTLTISSLQPEDFATYYCALWYSNLWVFGQGTKVEIK

SEQ ID NO: 2387 - DNA, 750 bp, synthetic construct
  source 1..750: mol_type = other DNA
gaggtccaactcgtggaatcaggcgggggattagtgcagcctggcggttcccttaggctctcgtgtgctgcatctggctttaccttcaatacatacgccatgaactgggtgcgtcaggcacccggaaagggattggagtgggtcggacgcattcgcagcaagtacaataactacgccacttactacgctgattccgtgaaaggccgattcacaatcagccgggacgatagcaaaaacaccctgtatctgcagatgaatagtctgagggccgaagacacagccgtgtactattgcgttcggcacgggaactttggcaattcttatgtatcctggttcgcctactgggggcagggcactctggtcaccgtttctagtggtggcggtggatcgggcggtggtggatctggaggaggtggctcggatatacaaatgacacagtctccctcttccctctctgcctcagtcggcgatcgcgtgacaattacatgtagatcctccacaggcgctgtgaccaatagcaactacgctaactgggtacagcagaagcctggcaaggcacccaaaggccttattggcggcacaaacaaacgggcacctggagtcccagccaggttctcgggaagtgggagcgggactgactttaccctgaccatctcaagcttacagccagaggacttcgctacgtattactgcgccctctggtacagcaacctgtgggtgtttgggcaagggaccaaggtggagatcaaa

SEQ ID NO: 2388 - protein, 250 aa, synthetic construct; identical to SEQ ID NO: 2356

SEQ ID NO: 2389 - DNA, 750 bp, synthetic construct; identical to SEQ ID NO: 2357
  source 1..750: mol_type = other DNA

SEQ ID NO: 2390 - protein, 242 aa, synthetic construct; identical to SEQ ID NO: 2358

SEQ ID NO: 2391 - DNA, 726 bp, synthetic construct; identical to SEQ ID NO: 2359
  source 1..726: mol_type = other DNA

SEQ ID NO: 2392 - protein, 742 aa, synthetic construct
EVQLVESGGGLVQPGGSLRLSCAASGFTFNTYAMNWVRQAPGKGLEWVGRIRSKYNNYATYYADSVKGRFTISRDDSKNTLYLQMNSLRAEDTAVYYCVRHGNFGNSYVSWFAYWGQGTLVTVSSGGGGSGGGGSGGGGSDIQMTQSPSSLSASVGDRVTITCRSSSGAVATNNYANWVQQKPGKAPKGLIGGNNKRAPGVPARFSGSGSGTDFTLTISSLQPEDFATYYCAAWHDNAWVFGQGTKVEIKGPGGPEPKSSDKTHTCPPCPAPEAAGGPSVFLFPPKPKDTLMISRTPEVTCVVVDVSHEDPEVKFNWYVDGVEVHNAKTKPREEQYNSTYRVVSVLTVLHQDWLNGKEYKCKVSNKALGAPIEKTISKAKGQPREPQVYTLPPSRDELTKNQVSLTCLVKGFYPSDIAVEWESNGQPENNYKTTPPVLDSDGSFFLYSKLTVDKSRWQQGNVFSCSVMHEALHNHYTQKSLSLSPGGGGSGGGGSGGGGSEVQLLESGGGLVQPGGSLRLSCAASGFTFSNYAMGWVRQAPGKGLEWVSVISSGGGGGTSYADSVKGRFTISRDNSKNTLYLQMNSLRAEDTAVYYCASPPRDYEGMDVWGQGTLVTVSSGGGGSGGGGSGGGGSDIQMTQSPSSLSASVGDRVTITCRASQQISTYLNWYQQKPGKAPKLLIYATSRLEDGVPSRFSGSGSGTDFTLTISSLQPEDFATYYCQQTYITPRTFGGGTKVEIK

SEQ ID NO: 2393 - DNA, 2226 bp, synthetic construct
  source 1..2226: mol_type = other DNA
gaggtccaactcgtggaatcaggcgggggattagtgcagcctggcggttcccttaggctctcgtgtgctgcatctggctttaccttcaacacatacgccatgaactgggtgcgtcaggcacccggaaagggattggagtgggtcggacgcatcaggagcaagtataacaattacgccacctactacgctgattccgtgaaaggccgattcacaatcagccgggacgatagcaaaaacaccctgtatctgcagatgaatagtctgagggccgaagacacagccgtgtactattgcgtgaggcacggcaacttcgggaatagctatgtctcctggtttgcctactgggggcagggcactctggtcaccgtttctagtggtggcggtggatcgggcggtggtggatctggaggaggtggctcggatatacaaatgacacagtctccctcttccctctctgcctcagtcggcgatcgcgtgacaattacatgtagatcctccagcggagccgtggctaccaacaattacgctaactgggtacagcagaagcctggcaaggcacccaaaggccttattggcggcaacaataaacgggcacctggagtcccagccaggttctcgggaagtgggagcgggactgactttaccctgaccatctcaagcttacagccagaggacttcgctacgtattactgcgccgcatggcacgacaacgcttgggtgtttgggcaagggaccaaggtggagatcaaaggtccgggaggccccgagcccaaatcttctgacaaaactcacacatgcccaccgtgcccagcacctgaagcagcggggggaccgtcagtcttcctcttccccccaaaacccaaggacaccctcatgatctcccggacccctgaggtcacatgcgtggtggtggacgtgagccacgaagaccctgaggtcaagttcaactggtacgtggacggcgtggaggtgcataatgccaagacaaagccgcgggaggagcagtacaacagcacgtaccgtgtggtcagcgtcctcaccgtcctgcaccaggactggctgaatggcaaggagtacaagtgcaaggtgtccaacaaagccctcggagcccccatcgagaaaaccatctccaaagccaaagggcagccccgagaaccacaggtgtacaccctgcccccatcccgggatgagctgaccaagaaccaggtcagcctgacctgcctggtcaaaggcttctatcccagcgacatcgccgtggagtgggagagcaatgggcagccggagaacaactacaagaccacgcctcccgtgctggactccgacggctccttcttcctctatagcaagctcaccgtggacaagagcagatggcagcaggggaacgtcttctcatgctccgtgatgcatgaggctctgcacaaccactacacgcagaaaagtctctccctgtctccgggtggcggtggatcgggcggtggtggatctggaggaggtggctcggaggtgcagctcttagaaagcggaggtggcttggttcagcctggcggtagtctaagactgtcctgtgcagcttctggcttcacctttagcaactatgcgatgggttgggtccgtcaagcaccaggtaagggtctggaatgggtgtctgtcatctcttccggtggcggtggtggaacctcttatgccgatagcgtgaaaggacgcttcaccatcagcagggacaattccaagaacacgctgtacctgcaaatgaacagcctgcgagccgaggatacggccgtgtattactgtgcttcacctcctcgagactacgagggcatggatgtttggggccagggaaccctggtcaccgtctcctcaggtggcggtggatcaggaggtggaggatctggaggaggtggcagcgatattcagatgacccagagcccatcctccctgtcagcttctgtaggagaccgcgttaccatcacctgtcgtgccagccaacagatttccacttacctgaactggtatcagcagaagcctggtaaggcaccgaagctgctgatctatgccaccagccgtctggaagatggcgtcccgtcacgctttagtggctctggttctgggaccgacttcactctcaccattagcagtctgcaaccggaggacttcgcgacatactattgccagcagacatatatcaccccgcgcacctttggaggcggtaccaaggtggagatcaaa

SEQ ID NO: 2394 - protein, 250 aa, synthetic construct
EVQLVESGGGLVQPGGSLRLSCAASGFTFNTYAMNWVRQAPGKGLEWVGRIRSKYNNYATYYADSVKGRFTISRDDSKNTLYLQMNSLRAEDTAVYYCVRHGNFGNSYVSWFAYWGQGTLVTVSSGGGGSGGGGSGGGGSDIQMTQSPSSLSASVGDRVTITCRSSSGAVATNNYANWVQQKPGKAPKGLIGGNNKRAPGVPARFSGSGSGTDFTLTISSLQPEDFATYYCAAWHDNAWVFGQGTKVEIK

SEQ ID NO: 2395 - DNA, 750 bp, synthetic construct
  source 1..750: mol_type = other DNA
gaggtccaactcgtggaatcaggcgggggattagtgcagcctggcggttcccttaggctctcgtgtgctgcatctggctttaccttcaacacatacgccatgaactgggtgcgtcaggcacccggaaagggattggagtgggtcggacgcatcaggagcaagtataacaattacgccacctactacgctgattccgtgaaaggccgattcacaatcagccgggacgatagcaaaaacaccctgtatctgcagatgaatagtctgagggccgaagacacagccgtgtactattgcgtgaggcacggcaacttcgggaatagctatgtctcctggtttgcctactgggggcagggcactctggtcaccgtttctagtggtggcggtggatcgggcggtggtggatctggaggaggtggctcggatatacaaatgacacagtctccctcttccctctctgcctcagtcggcgatcgcgtgacaattacatgtagatcctccagcggagccgtggctaccaacaattacgctaactgggtacagcagaagcctggcaaggcacccaaaggccttattggcggcaacaataaacgggcacctggagtcccagccaggttctcgggaagtgggagcgggactgactttaccctgaccatctcaagcttacagccagaggacttcgctacgtattactgcgccgcatggcacgacaacgcttgggtgtttgggcaagggaccaaggtggagatcaaa

SEQ ID NO: 2396 - protein, 250 aa, synthetic construct; identical to SEQ ID NO: 2356

SEQ ID NO: 2397 - DNA, 750 bp, synthetic construct; identical to SEQ ID NO: 2357
  source 1..750: mol_type = other DNA

SEQ ID NO: 2398 - protein, 242 aa, synthetic construct; identical to SEQ ID NO: 2358

SEQ ID NO: 2399 - DNA, 726 bp, synthetic construct; identical to SEQ ID NO: 2359
  source 1..726: mol_type = other DNA

SEQ ID NO: 2400 - protein, 742 aa, synthetic construct
EVQLVESGGGLVQPGGSLRLSCAASGFAFNVYAMNWVRQAPGKGLEWVGRIRSKHNNYAAYYADSVKGRFTISRDDSKNTLYLQMNSLRAEDTAVYYCVRHGNFGNSYVSWFAYWGQGTLVTVSSGGGGSGGGGSGGGGSDIQMTQSPSSLSASVGDRVTITCRSSSGAVATNNYANWVQQKPGKAPKGLIGGTNKRAPGVPARFSGSGSGTDFTLTISSLQPEDFATYYCALWYSNLWVFGQGTKVEIKGPGGPEPKSSDKTHTCPPCPAPEAAGGPSVFLFPPKPKDTLMISRTPEVTCVVVDVSHEDPEVKFNWYVDGVEVHNAKTKPREEQYNSTYRVVSVLTVLHQDWLNGKEYKCKVSNKALGAPIEKTISKAKGQPREPQVYTLPPSRDELTKNQVSLTCLVKGFYPSDIAVEWESNGQPENNYKTTPPVLDSDGSFFLYSKLTVDKSRWQQGNVFSCSVMHEALHNHYTQKSLSLSPGGGGSGGGGSGGGGSEVQLLESGGGLVQPGGSLRLSCAASGFTFSNYAMGWVRQAPGKGLEWVSVISSGGGGGTSYADSVKGRFTISRDNSKNTLYLQMNSLRAEDTAVYYCASPPRDYEGMDVWGQGTLVTVSSGGGGSGGGGSGGGGSDIQMTQSPSSLSASVGDRVTITCRASQQISTYLNWYQQKPGKAPKLLIYATSRLEDGVPSRFSGSGSGTDFTLTISSLQPEDFATYYCQQTYITPRTFGGGTKVEIK

SEQ ID NO: 2401 - DNA, 2226 bp, synthetic construct
  source 1..2226: mol_type = other DNA
gaggtccaactcgtggaatcaggcgggggattagtgcagcctggcggttcccttaggctctcgtgtgctgcatctggctttgctttcaacgtgtacgccatgaactgggtgcgtcaggcacccggaaagggattggagtgggtcggacgcatcaggagcaagcacaacaattacgctgcctactacgctgattccgtgaaaggccgattcacaatcagccgggacgatagcaaaaacaccctgtatctgcagatgaatagtctgagggccgaagacacagccgtgtactattgcgtgaggcacggcaacttcgggaatagctatgtctcctggtttgcctactgggggcagggcactctggtcaccgtttctagtggtggcggtggatcgggcggtggtggatctggaggaggtggctcggatatacaaatgacacagtctccctcttccctctctgcctcagtcggcgatcgcgtgacaattacatgtagatcctccagcggagccgtggctaccaacaattacgctaactgggtacagcagaagcctggcaaggcacccaaaggccttattggcggcacaaacaaacgggcacctggagtcccagccaggttctcgggaagtgggagcgggactgactttaccctgaccatctcaagcttacagccagaggacttcgctacgtattactgcgccctgtggtacagcaacctctgggtgtttgggcaagggaccaaggtggagatcaaaggtccgggaggccccgagcccaaatcttctgacaaaactcacacatgcccaccgtgcccagcacctgaagcagcggggggaccgtcagtcttcctcttccccccaaaacccaaggacaccctcatgatctcccggacccctgaggtcacatgcgtggtggtggacgtgagccacgaagaccctgaggtcaagttcaactggtacgtggacggcgtggaggtgcataatgccaagacaaagccgcgggaggagcagtacaacagcacgtaccgtgtggtcagcgtcctcaccgtcctgcaccaggactggctgaatggcaaggagtacaagtgcaaggtgtccaacaaagccctcggagcccccatcgagaaaaccatctccaaagccaaagggcagccccgagaaccacaggtgtacaccctgcccccatcccgggatgagctgaccaagaaccaggtcagcctgacctgcctggtcaaaggcttctatcccagcgacatcgccgtggagtgggagagcaatgggcagccggagaacaactacaagaccacgcctcccgtgctggactccgacggctccttcttcctctatagcaagctcaccgtggacaagagcagatggcagcaggggaacgtcttctcatgctccgtgatgcatgaggctctgcacaaccactacacgcagaaaagtctctccctgtctccgggtggcggtggatcgggcggtggtggatctggaggaggtggctcggaggtgcagctcttagaaagcggaggtggcttggttcagcctggcggtagtctaagactgtcctgtgcagcttctggcttcacctttagcaactatgcgatgggttgggtccgtcaagcaccaggtaagggtctggaatgggtgtctgtcatctcttccggtggcggtggtggaacctcttatgccgatagcgtgaaaggacgcttcaccatcagcagggacaattccaagaacacgctgtacctgcaaatgaacagcctgcgagccgaggatacggccgtgtattactgtgcttcacctcctcgagactacgagggcatggatgtttggggccagggaaccctggtcaccgtctcctcaggtggcggtggatcaggaggtggaggatctggaggaggtggcagcgatattcagatgacccagagcccatcctccctgtcagcttctgtaggagaccgcgttaccatcacctgtcgtgccagccaacagatttccacttacctgaactggtatcagcagaagcctggtaaggcaccgaagctgctgatctatgccaccagccgtctggaagatggcgtcccgtcacgctttagtggctctggttctgggaccgacttcactctcaccattagcagtctgcaaccggaggacttcgcgacatactattgccagcagacatatatcaccccgcgcacctttggaggcggtaccaaggtggagatcaaa

SEQ ID NO: 2402 - protein, 250 aa, synthetic construct
EVQLVESGGGLVQPGGSLRLSCAASGFAFNVYAMNWVRQAPGKGLEWVGRIRSKHNNYAAYYADSVKGRFTISRDDSKNTLYLQMNSLRAEDTAVYYCVRHGNFGNSYVSWFAYWGQGTLVTVSSGGGGSGGGGSGGGGSDIQMTQSPSSLSASVGDRVTITCRSSSGAVATNNYANWVQQKPGKAPKGLIGGTNKRAPGVPARFSGSGSGTDFTLTISSLQPEDFATYYCALWYSNLWVFGQGTKVEIK

SEQ ID NO: 2403 - DNA, 750 bp, synthetic construct
  source 1..750: mol_type = other DNA
gaggtccaactcgtggaatcaggcgggggattagtgcagcctggcggttcccttaggctctcgtgtgctgcatctggctttgctttcaacgtgtacgccatgaactgggtgcgtcaggcacccggaaagggattggagtgggtcggacgcatcaggagcaagcacaacaattacgctgcctactacgctgattccgtgaaaggccgattcacaatcagccgggacgatagcaaaaacaccctgtatctgcagatgaatagtctgagggccgaagacacagccgtgtactattgcgtgaggcacggcaacttcgggaatagctatgtctcctggtttgcctactgggggcagggcactctggtcaccgtttctagtggtggcggtggatcgggcggtggtggatctggaggaggtggctcggatatacaaatgacacagtctccctcttccctctctgcctcagtcggcgatcgcgtgacaattacatgtagatcctccagcggagccgtggctaccaacaattacgctaactgggtacagcagaagcctggcaaggcacccaaaggccttattggcggcacaaacaaacgggcacctggagtcccagccaggttctcgggaagtgggagcgggactgactttaccctgaccatctcaagcttacagccagaggacttcgctacgtattactgcgccctgtggtacagcaacctctgggtgtttgggcaagggaccaaggtggagatcaaa

SEQ ID NO: 2404 - protein, 250 aa, synthetic construct; identical to SEQ ID NO: 2356

SEQ ID NO: 2405 - DNA, 750 bp, synthetic construct; identical to SEQ ID NO: 2357
  source 1..750: mol_type = other DNA

SEQ ID NO: 2406 - protein, 242 aa, synthetic construct; identical to SEQ ID NO: 2358

SEQ ID NO: 2407 - DNA, 726 bp, synthetic construct; identical to SEQ ID NO: 2359
  source 1..726: mol_type = other DNA

SEQ ID NO: 2408 - protein, 742 aa, synthetic construct
EVQLVESGGGLVQPGGSLRLSCAASGFDFNAYAMNWVRQAPGKGLEWVGRIRSKYNNYATYYADSVKGRFTISRDDSKNTLYLQMNSLRAEDTAVYYCVRHGNFGNSYVSWFAYWGQGTLVTVSSGGGGSGGGGSGGGGSDIQMTQSPSSLSASVGDRVTITCRSSTGAVTTSNYANWVQQKPGKAPKGLIGGTNKRAPGVPARFSGSGSGTDFTLTISSLQPEDFATYYCAAWHDNAWVFGQGTKVEIKGPGGPEPKSSDKTHTCPPCPAPEAAGGPSVFLFPPKPKDTLMISRTPEVTCVVVDVSHEDPEVKFNWYVDGVEVHNAKTKPREEQYNSTYRVVSVLTVLHQDWLNGKEYKCKVSNKALGAPIEKTISKAKGQPREPQVYTLPPSRDELTKNQVSLTCLVKGFYPSDIAVEWESNGQPENNYKTTPPVLDSDGSFFLYSKLTVDKSRWQQGNVFSCSVMHEALHNHYTQKSLSLSPGGGGSGGGGSGGGGSEVQLLESGGGLVQPGGSLRLSCAASGFTFSNYAMGWVRQAPGKGLEWVSVISSGGGGGTSYADSVKGRFTISRDNSKNTLYLQMNSLRAEDTAVYYCASPPRDYEGMDVWGQGTLVTVSSGGGGSGGGGSGGGGSDIQMTQSPSSLSASVGDRVTITCRASQQISTYLNWYQQKPGKAPKLLIYATSRLEDGVPSRFSGSGSGTDFTLTISSLQPEDFATYYCQQTYITPRTFGGGTKVEIK

SEQ ID NO: 2409 - DNA, 2226 bp, synthetic construct
  source 1..2226: mol_type = other DNA
gaggtccaactcgtggaatcaggcgggggattagtgcagcctggcggttcccttaggctctcgtgtgctgcatctggcttcgactttaatgcctacgccatgaactgggtgcgtcaggcacccggaaagggattggagtgggtcggacgcattcgcagcaagtacaataactacgccacttactacgctgattccgtgaaaggccgattcacaatcagccgggacgatagcaaaaacaccctgtatctgcagatgaatagtctgagggccgaagacacagccgtgtactattgcgttcggcacgggaactttggcaattcttatgtatcctggttcgcctactgggggcagggcactctggtcaccgtttctagtggtggaggcgggagtggaggtggcggcagtggtggcggcggaagcgatatacaaatgacacagtctccctcttccctctctgcctcagtcggcgatcgcgtgacaattacatgtagatcctccactggtgccgttaccacatccaactacgctaactgggtacagcagaagcctggcaaggcacccaaaggccttattggcgggactaataaacgggcacctggagtcccagccaggttctcgggaagtgggagcgggactgactttaccctgaccatctcaagcttacagccagaggacttcgctacgtattactgcgccgcatggcacgacaacgcttgggtgtttgggcaagggaccaaggtggagatcaaaggtccgggaggccccgagcccaaatcttctgacaaaactcacacatgcccaccgtgcccagcacctgaagcagcggggggaccgtcagtcttcctcttccccccaaaacccaaggacaccctcatgatctcccggacccctgaggtcacatgcgtggtggtggacgtgagccacgaagaccctgaggtcaagttcaactggtacgtggacggcgtggaggtgcataatgccaagacaaagccgcgggaggagcagtacaacagcacgtaccgtgtggtcagcgtcctcaccgtcctgcaccaggactggctgaatggcaaggagtacaagtgcaaggtgtccaacaaagccctcggagcccccatcgagaaaaccatctccaaagccaaagggcagccccgagaaccacaggtgtacaccctgcccccatcccgggatgagctgaccaagaaccaggtcagcctgacctgcctggtcaaaggcttctatcccagcgacatcgccgtggagtgggagagcaatgggcagccggagaacaactacaagaccacgcctcccgtgctggactccgacggctccttcttcctctatagcaagctcaccgtggacaagagcagatggcagcaggggaacgtcttctcatgctccgtgatgcatgaggctctgcacaaccactacacgcagaaaagtctctccctgtctccgggtggcggtggatcgggcggtggtggatctggaggaggtggctcggaggtgcagctcttagaaagcggaggtggcttggttcagcctggcggtagtctaagactgtcctgtgcagcttctggcttcacctttagcaactatgcgatgggttgggtccgtcaagcaccaggtaagggtctggaatgggtgtctgtcatctcttccggtggcggtggtggaacctcttatgccgatagcgtgaaaggacgcttcaccatcagcagggacaattccaagaacacgctgtacctgcaaatgaacagcctgcgagccgaggatacggccgtgtattactgtgcttcacctcctcgagactacgagggcatggatgtttggggccagggaaccctggtcaccgtctcctcaggtggcggtggatcaggaggtggaggatctggaggaggtggcagcgatattcagatgacccagagcccatcctccctgtcagcttctgtaggagaccgcgttaccatcacctgtcgtgccagccaacagatttccacttacctgaactggtatcagcagaagcctggtaaggcaccgaagctgctgatctatgccaccagccgtctggaagatggcgtcccgtcacgctttagtggctctggttctgggaccgacttcactctcaccattagcagtctgcaaccggaggacttcgcgacatactattgccagcagacatatatcaccccgcgcacctttggaggcggtaccaaggtggagatcaaa

SEQ ID NO: 2410 - protein, 250 aa, synthetic construct
EVQLVESGGGLVQPGGSLRLSCAASGFDFNAYAMNWVRQAPGKGLEWVGRIRSKYNNYATYYADSVKGRFTISRDDSKNTLYLQMNSLRAEDTAVYYCVRHGNFGNSYVSWFAYWGQGTLVTVSSGGGGSGGGGSGGGGSDIQMTQSPSSLSASVGDRVTITCRSSTGAVTTSNYANWVQQKPGKAPKGLIGGTNKRAPGVPARFSGSGSGTDFTLTISSLQPEDFATYYCAAWHDNAWVFGQGTKVEIK

SEQ ID NO: 2411 - DNA, 750 bp, synthetic construct
  source 1..750: mol_type = other DNA
gaggtccaactcgtggaatcaggcgggggattagtgcagcctggcggttcccttaggctctcgtgtgctgcatctggcttcgactttaatgcctacgccatgaactgggtgcgtcaggcacccggaaagggattggagtgggtcggacgcattcgcagcaagtacaataactacgccacttactacgctgattccgtgaaaggccgattcacaatcagccgggacgatagcaaaaacaccctgtatctgcagatgaatagtctgagggccgaagacacagccgtgtactattgcgttcggcacgggaactttggcaattcttatgtatcctggttcgcctactgggggcagggcactctggtcaccgtttctagtggtggaggcgggagtggaggtggcggcagtggtggcggcggaagcgatatacaaatgacacagtctccctcttccctctctgcctcagtcggcgatcgcgtgacaattacatgtagatcctccactggtgccgttaccacatccaactacgctaactgggtacagcagaagcctggcaaggcacccaaaggccttattggcgggactaataaacgggcacctggagtcccagccaggttctcgggaagtgggagcgggactgactttaccctgaccatctcaagcttacagccagaggacttcgctacgtattactgcgccgcatggcacgacaacgcttgggtgtttgggcaagggaccaaggtggagatcaaa

SEQ ID NO: 2412 - protein, 250 aa, synthetic construct; identical to SEQ ID NO: 2356

SEQ ID NO: 2413 - DNA, 750 bp, synthetic construct; identical to SEQ ID NO: 2357
  source 1..750: mol_type = other DNA

SEQ ID NO: 2414 - protein, 242 aa, synthetic construct; identical to SEQ ID NO: 2358

SEQ ID NO: 2415 - DNA, 726 bp, synthetic construct; identical to SEQ ID NO: 2359
  source 1..726: mol_type = other DNA

SEQ ID NO: 2416 - protein, 742 aa, synthetic construct
EVQLVESGGGLVQPGGSLRLSCAASGFTFDNYAMNWVRQAPGKGLEWVGRIRSKYNSYATYYADSVKGRFTISRDDSKNTLYLQMNSLRAEDTAVYYCVRHGNFGNSYVSWFAYWGQGTLVTVSSGGGGSGGGGSGGGGSDIQMTQSPSSLSASVGDRVTITCRSSSGAVATNNYANWVQQKPGKAPKGLIGGTNKRAPGVPARFSGSGSGTDFTLTISSLQPEDFATYYCALWYSNLWVFGQGTKVEIKGPGGPEPKSSDKTHTCPPCPAPEAAGGPSVFLFPPKPKDTLMISRTPEVTCVVVDVSHEDPEVKFNWYVDGVEVHNAKTKPREEQYNSTYRVVSVLTVLHQDWLNGKEYKCKVSNKALGAPIEKTISKAKGQPREPQVYTLPPSRDELTKNQVSLTCLVKGFYPSDIAVEWESNGQPENNYKTTPPVLDSDGSFFLYSKLTVDKSRWQQGNVFSCSVMHEALHNHYTQKSLSLSPGGGGSGGGGSGGGGSEVQLLESGGGLVQPGGSLRLSCAASGFTFSNYAMGWVRQAPGKGLEWVSVISSGGGGGTSYADSVKGRFTISRDNSKNTLYLQMNSLRAEDTAVYYCASPPRDYEGMDVWGQGTLVTVSSGGGGSGGGGSGGGGSDIQMTQSPSSLSASVGDRVTITCRASQQISTYLNWYQQKPGKAPKLLIYATSRLEDGVPSRFSGSGSGTDFTLTISSLQPEDFATYYCQQTYITPRTFGGGTKVEIK

SEQ ID NO: 2417 - DNA, 2226 bp, synthetic construct
  source 1..2226: mol_type = other DNA
gaggtccaactcgtggaatcaggcgggggattagtgcagcctggcggttcccttaggctctcgtgtgctgcatctggcttcacctttgacaactacgccatgaactgggtgcgtcaggcacccggaaagggattggagtgggtcggacgcatcaggtccaagtataacagctacgccacctactacgctgattccgtgaaaggccgattcacaatcagccgggacgatagcaaaaacaccctgtatctgcagatgaatagtctgagggccgaagacacagccgtgtactattgcgtgaggcacggcaacttcgggaatagctatgtctcctggtttgcctactgggggcagggcactctggtcaccgtttctagtggtggcggtggatcgggcggtggtggatctggaggaggtggctcggatatacaaatgacacagtctccctcttccctctctgcctcagtcggcgatcgcgtgacaattacatgtagatcctccagcggagccgtggctaccaacaattacgctaactgggtacagcagaagcctggcaaggcacccaaaggccttattggcggcacaaacaaacgggcacctggagtcccagccaggttctcgggaagtgggagcgggactgactttaccctgaccatctcaagcttacagccagaggacttcgctacgtattactgcgccctgtggtacagcaacctctgggtgtttgggcaagggaccaaggtggagatcaaaggtccgggaggccccgagcccaaatcttctgacaaaactcacacatgcccaccgtgcccagcacctgaagcagcggggggaccgtcagtcttcctcttccccccaaaacccaaggacaccctcatgatctcccggacccctgaggtcacatgcgtggtggtggacgtgagccacgaagaccctgaggtcaagttcaactggtacgtggacggcgtggaggtgcataatgccaagacaaagccgcgggaggagcagtacaacagcacgtaccgtgtggtcagcgtcctcaccgtcctgcaccaggactggctgaatggcaaggagtacaagtgcaaggtgtccaacaaagccctcggagcccccatcgagaaaaccatctccaaagccaaagggcagccccgagaaccacaggtgtacaccctgcccccatcccgggatgagctgaccaagaaccaggtcagcctgacctgcctggtcaaaggcttctatcccagcgacatcgccgtggagtgggagagcaatgggcagccggagaacaactacaagaccacgcctcccgtgctggactccgacggctccttcttcctctatagcaagctcaccgtggacaagagcagatggcagcaggggaacgtcttctcatgctccgtgatgcatgaggctctgcacaaccactacacgcagaaaagtctctccctgtctccgggtggcggtggatcgggcggtggtggatctggaggaggtggctcggaggtgcagctcttagaaagcggaggtggcttggttcagcctggcggtagtctaagactgtcctgtgcagcttctggcttcacctttagcaactatgcgatgggttgggtccgtcaagcaccaggtaagggtctggaatgggtgtctgtcatctcttccggtggcggtggtggaacctcttatgccgatagcgtgaaaggacgcttcaccatcagcagggacaattccaagaacacgctgtacctgcaaatgaacagcctgcgagccgaggatacggccgtgtattactgtgcttcacctcctcgagactacgagggcatggatgtttggggccagggaaccctggtcaccgtctcctcaggtggcggtggatcaggaggtggaggatctggaggaggtggcagcgatattcagatgacccagagcccatcctccctgtcagcttctgtaggagaccgcgttaccatcacctgtcgtgccagccaacagatttccacttacctgaactggtatcagcagaagcctggtaaggcaccgaagctgctgatctatgccaccagccgtctggaagatggcgtcccgtcacgctttagtggctctggttctgggaccgacttcactctcaccattagcagtctgcaaccggaggacttcgcgacatactattgccagcagacatatatcaccccgcgcacctttggaggcggtaccaaggtggagatcaaa

SEQ ID NO: 2418 - protein, 250 aa, synthetic construct
EVQLVESGGGLVQPGGSLRLSCAASGFTFDNYAMNWVRQAPGKGLEWVGRIRSKYNSYATYYADSVKGRFTISRDDSKNTLYLQMNSLRAEDTAVYYCVRHGNFGNSYVSWFAYWGQGTLVTVSSGGGGSGGGGSGGGGSDIQMTQSPSSLSASVGDRVTITCRSSSGAVATNNYANWVQQKPGKAPKGLIGGTNKRAPGVPARFSGSGSGTDFTLTISSLQPEDFATYYCALWYSNLWVFGQGTKVEIK

SEQ ID NO: 2419 - DNA, 750 bp, synthetic construct
  source 1..750: mol_type = other DNA
gaggtccaactcgtggaatcaggcgggggattagtgcagcctggcggttcccttaggctctcgtgtgctgcatctggcttcacctttgacaactacgccatgaactgggtgcgtcaggcacccggaaagggattggagtgggtcggacgcatcaggtccaagtataacagctacgccacctactacgctgattccgtgaaaggccgattcacaatcagccgggacgatagcaaaaacaccctgtatctgcagatgaatagtctgagggccgaagacacagccgtgtactattgcgtgaggcacggcaacttcgggaatagctatgtctcctggtttgcctactgggggcagggcactctggtcaccgtttctagtggtggcggtggatcgggcggtggtggatctggaggaggtggctcggatatacaaatgacacagtctccctcttccctctctgcctcagtcggcgatcgcgtgacaattacatgtagatcctccagcggagccgtggctaccaacaattacgctaactgggtacagcagaagcctggcaaggcacccaaaggccttattggcggcacaaacaaacgggcacctggagtcccagccaggttctcgggaagtgggagcgggactgactttaccctgaccatctcaagcttacagccagaggacttcgctacgtattactgcgccctgtggtacagcaacctctgggtgtttgggcaagggaccaaggtggagatcaaa

SEQ ID NO: 2420 - protein, 250 aa, synthetic construct; identical to SEQ ID NO: 2356

SEQ ID NO: 2421 - DNA, 750 bp, synthetic construct; identical to SEQ ID NO: 2357
  source 1..750: mol_type = other DNA

SEQ ID NO: 2422 - protein, 242 aa, synthetic construct; identical to SEQ ID NO: 2358

SEQ ID NO: 2423 - DNA, 726 bp, synthetic construct; identical to SEQ ID NO: 2359
  source 1..726: mol_type = other DNA

SEQ ID NO: 2424 - protein, 732 aa, synthetic construct
EVKLVESGGGLVQPGGSLKLSCAASGFTFSSYAMSWVRQTPDKRLEWVATISSGGSYTYYPDSVKGRFTISRDNAKNTLYLQMSSLRSEDTAMYYCAREGILWLDYWGQGTTLTVSSGGGGSGGGGSGGGGSDIQMTQTTSSLSASLGDRVTISCRASQDISNYLNWYQQKPDGTVKLLIYYTSRLHSGVPSRFSGSGSGTDYSLTISNLEQEDIATYFCQQGNTLPWTFGGGTKLEIKRGPGGPEPKSSDKTHTCPPCPAPEAAGGPSVFLFPPKPKDTLMISRTPEVTCVVVDVSHEDPEVKFNWYVDGVEVHNAKTKPREEQYNSTYRVVSVLTVLHQDWLNGKEYKCKVSNKALGAPIEKTISKAKGQPREPQVYTLPPSRDELTKNQVSLTCLVKGFYPSDIAVEWESNGQPENNYKTTPPVLDSDGSFFLYSKLTVDKSRWQQGNVFSCSVMHEALHNHYTQKSLSLSPGGGGSGGGGSGGGGSEVQLLESGGGLVQPGGSLRLSCAASGFTFSNYAMGWVRQAPGKGLEWVSVISSGGGGGTSYADSVKGRFTISRDNSKNTLYLQMNSLRAEDTAVYYCASPPRDYEGMDVWGQGTLVTVSSGGGGSGGGGSGGGGSDIQMTQSPSSLSASVGDRVTITCRASQQISTYLNWYQQKPGKAPKLLIYATSRLEDGVPSRFSGSGSGTDFTLTISSLQPEDFATYYCQQTYITPRTFGGGTKVEIK

SEQ ID NO: 2425 - DNA, 2196 bp, synthetic construct
  source 1..2196: mol_type = other DNA
gaggtgaagctggtggagtctgggggaggcttagtgcagcctggagggtccctgaaactctcctgtgcagcctctggattcactttcagtagctatgccatgtcttgggttcgccagactccagacaagaggctggagtgggtcgcaaccattagtagtggtggtagttacacctactatccagacagtgtgaagggtcgattcaccatctccagagacaatgccaagaacaccctgtatctgcaaatgagtagtctgaggtctgaggacacggccatgtattactgtgcaagagaaggaatactatggcttgactactggggccaaggcaccactctcacagtctcctcgggtggcggtggatcgggcggtggtggatctggaggaggtggctcggacatccagatgacacagactacatcctccctgtctgcctctctgggagacagagtcaccatcagttgcagggcaagtcaggacattagcaattatttaaactggtatcagcagaaaccagatggaactgttaaactcctgatctactacacatcaagattacactcaggagtcccatcaaggttcagtggcagtgggtctggaacagattattctctcaccattagcaacctggagcaagaagatattgccacttacttttgccaacagggtaatacgcttccgtggacgttcggtggaggcaccaagctggaaatcaaacgcggtccgggaggccccgagcccaaatcttctgacaaaactcacacatgcccaccgtgcccagcacctgaagcagcggggggaccgtcagtcttcctcttccccccaaaacccaaggacaccctcatgatctcccggacccctgaggtcacatgcgtggtggtggacgtgagccacgaagaccctgaggtcaagttcaactggtacgtggacggcgtggaggtgcataatgccaagacaaagccgcgggaggagcagtacaacagcacgtaccgtgtggtcagcgtcctcaccgtcctgcaccaggactggctgaatggcaaggagtacaagtgcaaggtgtccaacaaagccctcggagcccccatcgagaaaaccatctccaaagccaaagggcagccccgagaaccacaggtgtacaccctgcccccatcccgggatgagctgaccaagaaccaggtcagcctgacctgcctggtcaaaggcttctatcccagcgacatcgccgtggagtgggagagcaatgggcagccggagaacaactacaagaccacgcctcccgtgctggactccgacggctccttcttcctctatagcaagctcaccgtggacaagagcagatggcagcaggggaacgtcttctcatgctccgtgatgcatgaggctctgcacaaccactacacgcagaaaagtctctccctgtctccgggtggcggtggatcgggcggtggtggatctggaggaggtggctcggaggtgcagctcttagaaagcggaggtggcttggttcagcctggcggtagtctaagactgtcctgtgcagcttctggcttcacctttagcaactatgcgatgggttgggtccgtcaagcaccaggtaagggtctggaatgggtgtctgtcatctcttccggtggcggtggtggaacctcttatgccgatagcgtgaaaggacgcttcaccatcagcagggacaattccaagaacacgctgtacctgcaaatgaacagcctgcgagccgaggatacggccgtgtattactgtgcttcacctcctcgagactacgagggcatggatgtttggggccagggaaccctggtcaccgtctcctcaggtggcggtggatcaggaggtggaggatctggaggaggtggcagcgatattcagatgacccagagcccatcctccctgtcagcttctgtaggagaccgcgttaccatcacctgtcgtgccagccaacagatttccacttacctgaactggtatcagcagaagcctggtaaggcaccgaagctgctgatctatgccaccagccgtctggaagatggcgtcccgtcacgctttagtggctctggttctgggaccgacttcactctcaccattagcagtctgcaaccggaggacttcgcgacatactattgccagcagacatatatcaccccgcgcacctttggaggcggtaccaaggtggagatcaaa

SEQ ID NO: 2426 - protein, 240 aa, synthetic construct
EVKLVESGGGLVQPGGSLKLSCAASGFTFSSYAMSWVRQTPDKRLEWVATISSGGSYTYYPDSVKGRFTISRDNAKNTLYLQMSSLRSEDTAMYYCAREGILWLDYWGQGTTLTVSSGGGGSGGGGSGGGGSDIQMTQTTSSLSASLGDRVTISCRASQDISNYLNWYQQKPDGTVKLLIYYTSRLHSGVPSRFSGSGSGTDYSLTISNLEQEDIATYFCQQGNTLPWTFGGGTKLEIKR

SEQ ID NO: 2427 - DNA, 720 bp, synthetic construct
  source 1..720: mol_type = other DNA
gaggtgaagctggtggagtctgggggaggcttagtgcagcctggagggtccctgaaactctcctgtgcagcctctggattcactttcagtagctatgccatgtcttgggttcgccagactccagacaagaggctggagtgggtcgcaaccattagtagtggtggtagttacacctactatccagacagtgtgaagggtcgattcaccatctccagagacaatgccaagaacaccctgtatctgcaaatgagtagtctgaggtctgaggacacggccatgtattactgtgcaagagaaggaatactatggcttgactactggggccaaggcaccactctcacagtctcctcgggtggcggtggatcgggcggtggtggatctggaggaggtggctcggacatccagatgacacagactacatcctccctgtctgcctctctgggagacagagtcaccatcagttgcagggcaagtcaggacattagcaattatttaaactggtatcagcagaaaccagatggaactgttaaactcctgatctactacacatcaagattacactcaggagtcccatcaaggttcagtggcagtgggtctggaacagattattctctcaccattagcaacctggagcaagaagatattgccacttacttttgccaacagggtaatacgcttccgtggacgttcggtggaggcaccaagctggaaatcaaacgc

SEQ ID NO: 2428 - protein, 250 aa, synthetic construct; identical to SEQ ID NO: 2356

SEQ ID NO: 2429 - DNA, 750 bp, synthetic construct; identical to SEQ ID NO: 2357
  source 1..750: mol_type = other DNA

SEQ ID NO: 2430 - protein, 242 aa, synthetic construct; identical to SEQ ID NO: 2358

SEQ ID NO: 2431 - DNA, 726 bp, synthetic construct; identical to SEQ ID NO: 2359
  source 1..726: mol_type = other DNA

SEQ ID NO: 2432 - protein, 742 aa, synthetic construct
EVKLVESGGGLVQPGGSRKLSCSASGFTFSSYGMSWVRQTPDKRLEWVATISSGGSYTYYPDSVKGRFTISRDNAKNTLYLQMSSLKSEDTAMYYCARHSVKGYFDYWGQGTTLTVSSGGGGSGGGGSGGGGSDIVMTQSPSSLAVSAGEKVTMSCKSSQSLLNSRTRKNYLAWYQQKPGQSPKLLIYWASTRESGVPDRFTGSGSGTDFTLTISNVQSEDLAEYFCQQYNSYPLTFGGGTKLEIKGPGGPEPKSSDKTHTCPPCPAPEAAGGPSVFLFPPKPKDTLMISRTPEVTCVVVDVSHEDPEVKFNWYVDGVEVHNAKTKPREEQYNSTYRVVSVLTVLHQDWLNGKEYKCKVSNKALGAPIEKTISKAKGQPREPQVYTLPPSRDELTKNQVSLTCLVKGFYPSDIAVEWESNGQPENNYKTTPPVLDSDGSFFLYSKLTVDKSRWQQGNVFSCSVMHEALHNHYTQKSLSLSPGGGGSGGGGSGGGGSSLELTQPPSVSVSPGQTASITCSGSSGSYGWHQQKPGQSPVTVIYSSDKRPSGIPERFSGSSSGSTATLTISGTQAMDEADYYCGGYDGSTDVGIFGGGTKLTVLGGGGSGGGGSGGGGSQVQLLESGGGLVKPGGSLRLSCAASGFDFIDYDMFWIRQAPGKGLEWVGVINRSGSYTNYAPAVKGRATISRDNAKNSMYLQMNSLRAEDTAVYYCARGACTHCWDADSAGYIDAWGQGTLVTVSS

SEQ ID NO: 2433 - DNA, 2226 bp, synthetic construct
  source 1..2226: mol_type = other DNA
gaggtgaagctggtggagtctgggggaggcttagtgcagcctggagggtcccgaaaactctcctgttcagcctctggattcactttcagtagctatggcatgtcttgggttcgccagactccagacaagaggctggagtgggtcgcaaccattagtagtggtggtagttacacctactatccagacagtgtgaaggggcgattcaccatctccagagacaatgccaagaacaccctgtacctgcaaatgagcagtctgaagtctgaggacacggccatgtattactgtgcaagacattccgttaagggctactttgactactggggccaaggcaccactctcacagtctcctcgggtggcggtggatcgggcggtggtggatctggaggaggtggctcggatattgtgatgacacagtctccatcctccctggctgtgtcagcaggagagaaggtcactatgagctgcaaatccagtcagagtctgctcaacagtagaacccgaaagaactacttggcttggtaccagcagaaaccagggcagtctcctaaactgctgatctactgggcatccactagggaatctggggtccctgatcgcttcacaggcagtggatctgggacagatttcactctcaccatcagcaatgtgcagtctgaagacttggcagagtatttctgtcagcaatataacagctatcctctgacgttcggtggaggcaccaagctggaaataaaaggtccgggaggccccgagcccaaatcttctgacaaaactcacacatgcccaccgtgcccagcacctgaagcagcggggggaccgtcagtcttcctcttccccccaaaacccaaggacaccctcatgatctcccggacccctgaggtcacatgcgtggtggtggacgtgagccacgaagaccctgaggtcaagttcaactggtacgtggacggcgtggaggtgcataatgccaagacaaagccgcgggaggagcagtacaacagcacgtaccgtgtggtcagcgtcctcaccgtcctgcaccaggactggctgaatggcaaggagtacaagtgcaaggtgtccaacaaagccctcggagcccccatcgagaaaaccatctccaaagccaaagggcagccccgagaaccacaggtgtacaccctgcccccatcccgggatgagctgaccaagaaccaggtcagcctgacctgcctggtcaaaggcttctatcccagcgacatcgccgtggagtgggagagcaatgggcagccggagaacaactacaagaccacgcctcccgtgctggactccgacggctccttcttcctctatagcaagctcaccgtggacaagagcagatggcagcaggggaacgtcttctcatgctccgtgatgcatgaggctctgcacaaccactacacgcagaaaagtctctccctgtctccgggtggcggtggatcgggcggtggtggatctggaggaggtggctcgtccttagagctcacccagccaccttccgtaagcgtgtcaccaggacagaccgcatccatcacctgcagcgggagttctggcagctatggctggcaccagcagaaaccaggtcagagccctgtcacggttatctacagctcagataaaagacctagcgggataccggagaggttttccggctcatcctctgggagtactgcaacactgacaatatccggaactcaggccatggacgaggccgattactactgtggaggctacgacggaagcacagatgttgggatattcgggggaggaacaaaactcactgtgctcggtggcggaggaagcggtgggggcggaagcggggggggcggctcacaggtccagctcttagagtccggtggcgggctggtaaaaccgggcggctctctccgactctcctgtgccgcaagcggcttcgacttcattgactacgatatgttctggatcagacaggcgccaggcaaggggctcgagtgggtcggcgttataaacagatccggcagttacactaactatgctcctgctgtgaaaggacgcgctaccatctctagggataacgcaaaaaatagtatgtacctgcagatgaatagcctgcgtgccgaggacacagcagtgtactactgcgctagaggggcctgtacgcactgttgggatgccgactctgccggctacattgacgcctggggtcagggaacactggtcaccgtgagctct

SEQ ID NO: 2434 - protein, 246 aa, synthetic construct
EVKLVESGGGLVQPGGSRKLSCSASGFTFSSYGMSWVRQTPDKRLEWVATISSGGSYTYYPDSVKGRFTISRDNAKNTLYLQMSSLKSEDTAMYYCARHSVKGYFDYWGQGTTLTVSSGGGGSGGGGSGGGGSDIVMTQSPSSLAVSAGEKVTMSCKSSQSLLNSRTRKNYLAWYQQKPGQSPKLLIYWASTRESGVPDRFTGSGSGTDFTLTISNVQSEDLAEYFCQQYNSYPLTFGGGTKLEIK

SEQ ID NO: 2435 - DNA, 738 bp, synthetic construct
  source 1..738: mol_type = other DNA
gaggtgaagctggtggagtctgggggaggcttagtgcagcctggagggtcccgaaaactctcctgttcagcctctggattcactttcagtagctatggcatgtcttgggttcgccagactccagacaagaggctggagtgggtcgcaaccattagtagtggtggtagttacacctactatccagacagtgtgaaggggcgattcaccatctccagagacaatgccaagaacaccctgtacctgcaaatgagcagtctgaagtctgaggacacggccatgtattactgtgcaagacattccgttaagggctactttgactactggggccaaggcaccactctcacagtctcctcgggtggcggtggatcgggcggtggtggatctggaggaggtggctcggatattgtgatgacacagtctccatcctccctggctgtgtcagcaggagagaaggtcactatgagctgcaaatccagtcagagtctgctcaacagtagaacccgaaagaactacttggcttggtaccagcagaaaccagggcagtctcctaaactgctgatctactgggcatccactagggaatctggggtccctgatcgcttcacaggcagtggatctgggacagatttcactctcaccatcagcaatgtgcagtctgaagacttggcagagtatttctgtcagcaatataacagctatcctctgacgttcggtggaggcaccaagctggaaataaaa

SEQ ID NO: 2436 - protein, 250 aa, synthetic construct; identical to SEQ ID NO: 2356

SEQ ID NO: 2437 - DNA, 750 bp, synthetic construct; identical to SEQ ID NO: 2357
  source 1..750: mol_type = other DNA

SEQ ID NO: 2438 - protein, 246 aa, synthetic construct
SLELTQPPSVSVSPGQTASITCSGSSGSYGWHQQKPGQSPVTVIYSSDKRPSGIPERFSGSSSGSTATLTISGTQAMDEADYYCGGYDGSTDVGIFGGGTKLTVLGGGGSGGGGSGGGGSQVQLLESGGGLVKPGGSLRLSCAASGFDFIDYDMFWIRQAPGKGLEWVGVINRSGSYTNYAPAVKGRATISRDNAKNSMYLQMNSLRAEDTAVYYCARGACTHCWDADSAGYIDAWGQGTLVTVSS

SEQ ID NO: 2439 - DNA, 738 bp, synthetic construct
  source 1..738: mol_type = other DNA
tccttagagctcacccagccaccttccgtaagcgtgtcaccaggacagaccgcatccatcacctgcagcgggagttctggcagctatggctggcaccagcagaaaccaggtcagagccctgtcacggttatctacagctcagataaaagacctagcgggataccggagaggttttccggctcatcctctgggagtactgcaacactgacaatatccggaactcaggccatggacgaggccgattactactgtggaggctacgacggaagcacagatgttgggatattcgggggaggaacaaaactcactgtgctcggtggcggaggaagcggtgggggcggaagcggggggggcggctcacaggtccagctcttagagtccggtggcgggctggtaaaaccgggcggctctctccgactctcctgtgccgcaagcggcttcgacttcattgactacgatatgttctggatcagacaggcgccaggcaaggggctcgagtgggtcggcgttataaacagatccggcagttacactaactatgctcctgctgtgaaaggacgcgctaccatctctagggataacgcaaaaaatagtatgtacctgcagatgaatagcctgcgtgccgaggacacagcagtgtactactgcgctagaggggcctgtacgcactgttgggatgccgactctgccggctacattgacgcctggggtcagggaacactggtcaccgtgagctct

SEQ ID NO: 2440 - protein, 742 aa, synthetic construct; identical to SEQ ID NO: 2432

SEQ ID NO: 2441 - DNA, 2226 bp, synthetic construct; identical to SEQ ID NO: 2433
  source 1..2226: mol_type = other DNA

SEQ ID NO: 2442 - protein, 246 aa, synthetic construct; identical to SEQ ID NO: 2434

SEQ ID NO: 2443 - DNA, 738 bp, synthetic construct; identical to SEQ ID NO: 2435
  source 1..738: mol_type = other DNA

SEQ ID NO: 2444 - protein, 250 aa, synthetic construct; identical to SEQ ID NO: 2356

SEQ ID NO: 2445 - DNA, 750 bp, synthetic construct; identical to SEQ ID NO: 2357
  source 1..750: mol_type = other DNA

SEQ ID NO: 2446 - protein, 246 aa, synthetic construct; identical to SEQ ID NO: 2438

SEQ ID NO: 2447 - DNA, 738 bp, synthetic construct; identical to SEQ ID NO: 2439
  source 1..738: mol_type = other DNA

SEQ ID NO: 2448 - protein, 738 aa, synthetic construct
EVKLVESGGGLVQPGGSRKLSCSASGFTFSSYGMSWVRQTPDKRLEWVATISSGGSYTYYPDSVKGRFTISRDNAKNTLYLQMSSLKSEDTAMYYCARHSVKGYFDYWGQGTTLTVSSGGGGSGGGGSGGGGSDIVMTQSPSSLAVSAGEKVTMSCKSSQSLLNSRTRKNYLAWYQQKPGQSPKLLIYWASTRESGVPDRFTGSGSGTDFTLTISNVQSEDLAEYFCQQYNSYPLTFGGGTKLEIKGPGGPEPKSSDKTHTCPPCPAPEAAGGPSVFLFPPKPKDTLMISRTPEVTCVVVDVSHEDPEVKFNWYVDGVEVHNAKTKPREEQYNSTYRVVSVLTVLHQDWLNGKEYKCKVSNKALGAPIEKTISKAKGQPREPQVYTLPPSRDELTKNQVSLTCLVKGFYPSDIAVEWESNGQPENNYKTTPPVLDSDGSFFLYSKLTVDKSRWQQGNVFSCSVMHEALHNHYTQKSLSLSPGGGGSGGGGSGGGGSEVQLLESGGGLVQPGGSLRLSCAASGFTFSNYAMGWVRQAPGKGLEWVSVISSGGGGGTSYADSVKGRFTISRDNSKNTLYLQMNSLRAEDTAVYYCASPPRDYEGMDVWGQGTLVTVSSGGGGSGGGGSGGGGSDIQMTQSPSSLSASVGDRVTITCRASQQISTYLNWYQQKPGKAPKLLIYATSRLEDGVPSRFSGSGSGTDFTLTISSLQPEDFATYYCQQTYITPRTFGGGTKVEIK

SEQ ID NO: 2449 - DNA, 2214 bp, synthetic construct
  source 1..2214: mol_type = other DNA
gaggtgaagctggtggagtctgggggaggcttagtgcagcctggagggtcccgaaaactctcctgttcagcctctggattcactttcagtagctatggcatgtcttgggttcgccagactccagacaagaggctggagtgggtcgcaaccattagtagtggtggtagttacacctactatccagacagtgtgaaggggcgattcaccatctccagagacaatgccaagaacaccctgtacctgcaaatgagcagtctgaagtctgaggacacggccatgtattactgtgcaagacattccgttaagggctactttgactactggggccaaggcaccactctcacagtctcctcgggtggcggtggatcgggcggtggtggatctggaggaggtggctcggatattgtgatgacacagtctccatcctccctggctgtgtcagcaggagagaaggtcactatgagctgcaaatccagtcagagtctgctcaacagtagaacccgaaagaactacttggcttggtaccagcagaaaccagggcagtctcctaaactgctgatctactgggcatccactagggaatctggggtccctgatcgcttcacaggcagtggatctgggacagatttcactctcaccatcagcaatgtgcagtctgaagacttggcagagtatttctgtcagcaatataacagctatcctctgacgttcggtggaggcaccaagctggaaataaaaggtccgggaggccccgagcccaaatcttctgacaaaactcacacatgcccaccgtgcccagcacctgaagcagcggggggaccgtcagtcttcctcttccccccaaaacccaaggacaccctcatgatctcccggacccctgaggtcacatgcgtggtggtggacgtgagccacgaagaccctgaggtcaagttcaactggtacgtggacggcgtggaggtgcataatgccaagacaaagccgcgggaggagcagtacaacagcacgtaccgtgtggtcagcgtcctcaccgtcctgcaccaggactggctgaatggcaaggagtacaagtgcaaggtgtccaacaaagccctcggagcccccatcgagaaaaccatctccaaagccaaagggcagccccgagaaccacaggtgtacaccctgcccccatcccgggatgagctgaccaagaaccaggtcagcctgacctgcctggtcaaaggcttctatcccagcgacatcgccgtggagtgggagagcaatgggcagccggagaacaactacaagaccacgcctcccgtgctggactccgacggctccttcttcctctatagcaagctcaccgtggacaagagcagatggcagcaggggaacgtcttctcatgctccgtgatgcatgaggctctgcacaaccactacacgcagaaaagtctctccctgtctccgggtggcggtggatcgggcggtggtggatctggaggaggtggctcggaggtgcagctcttagaaagcggaggtggcttggttcagcctggcggtagtctaagactgtcctgtgcagcttctggcttcacctttagcaactatgcgatgggttgggtccgtcaagcaccaggtaagggtctggaatgggtgtctgtcatctcttccggtggcggtggtggaacctcttatgccgatagcgtgaaaggacgcttcaccatcagcagggacaattccaagaacacgctgtacctgcaaatgaacagcctgcgagccgaggatacggccgtgtattactgtgcttcacctcctcgagactacgagggcatggatgtttggggccagggaaccctggtcaccgtctcctcaggtggcggtggatcaggaggtggaggatctggaggaggtggcagcgatattcagatgacccagagcccatcctccctgtcagcttctgtaggagaccgcgttaccatcacctgtcgtgccagccaacagatttccacttacctgaactggtatcagcagaagcctggtaaggcaccgaagctgctgatctatgccaccagccgtctggaagatggcgtcccgtcacgctttagtggctctggttctgggaccgacttcactctcaccattagcagtctgcaaccggaggacttcgcgacatactattgccagcagacatatatcaccccgcgcacctttggaggcggtaccaaggtggagatcaaa

SEQ ID NO: 2450 - protein, 246 aa, synthetic construct; identical to SEQ ID NO: 2434

SEQ ID NO: 2451 - DNA, 738 bp, synthetic construct; identical to SEQ ID NO: 2435
  source 1..738: mol_type = other DNA

SEQ ID NO: 2452 - protein, 250 aa, synthetic construct; identical to SEQ ID NO: 2356

SEQ ID NO: 2453 - DNA, 750 bp, synthetic construct; identical to SEQ ID NO: 2357
  source 1..750: mol_type = other DNA

SEQ ID NO: 2454 - protein, 242 aa, synthetic construct; identical to SEQ ID NO: 2358

SEQ ID NO: 2455 - DNA, 726 bp, synthetic construct; identical to SEQ ID NO: 2359
  source 1..726: mol_type = other DNA

SEQ ID NO: 2456 - protein, 736 aa, synthetic construct
EVKLVESGGGLVQPGGSLKLSCAASGFTFSSYAMSWVRQTPDKRLEWVATISSGGSYTYYPDSVKGRFTISRDNAKNTLYLQMSSLRSEDTAMYYCAREGILWLDYWGQGTTLTVSSGGGGSGGGGSGGGGSDIQMTQTTSSLSASLGDRVTISCRASQDISNYLNWYQQKPDGTVKLLIYYTSRLHSGVPSRFSGSGSGTDYSLTISNLEQEDIATYFCQQGNTLPWTFGGGTKLEIKRGPGGPEPKSSDKTHTCPPCPAPEAAGGPSVFLFPPKPKDTLMISRTPEVTCVVVDVSHEDPEVKFNWYVDGVEVHNAKTKPREEQYNSTYRVVSVLTVLHQDWLNGKEYKCKVSNKALGAPIEKTISKAKGQPREPQVYTLPPSRDELTKNQVSLTCLVKGFYPSDIAVEWESNGQPENNYKTTPPVLDSDGSFFLYSKLTVDKSRWQQGNVFSCSVMHEALHNHYTQKSLSLSPGGGGSGGGGSGGGGSSLELTQPPSVSVSPGQTASITCSGSSGSYGWHQQKPGQSPVTVIYSSDKRPSGIPERFSGSSSGSTATLTISGTQAMDEADYYCGGYDGSTDVGIFGGGTKLTVLGGGGSGGGGSGGGGSQVQLLESGGGLVKPGGSLRLSCAASGFDFIDYDMFWIRQAPGKGLEWVGVINRSGSYTNYAPAVKGRATISRDNAKNSMYLQMNSLRAEDTAVYYCARGACTHCWDADSAGYIDAWGQGTLVTVSS

SEQ ID NO: 2457 - DNA, 2208 bp, synthetic construct
  source 1..2208: mol_type = other DNA
gaggtgaagctggtggagtctgggggaggcttagtgcagcctggagggtccctgaaactctcctgtgcagcctctggattcactttcagtagctatgccatgtcttgggttcgccagactccagacaagaggctggagtgggtcgcaaccattagtagtggtggtagttacacctactatccagacagtgtgaagggtcgattcaccatctccagagacaatgccaagaacaccctgtatctgcaaatgagtagtctgaggtctgaggacacggccatgtattactgtgcaagagaaggaatactatggcttgactactggggccaaggcaccactctcacagtctcctcgggtggcggtggatcgggcggtggtggatctggaggaggtggctcggacatccagatgacacagactacatcctccctgtctgcctctctgggagacagagtcaccatcagttgcagggcaagtcaggacattagcaattatttaaactggtatcagcagaaaccagatggaactgttaaactcctgatctactacacatcaagattacactcaggagtcccatcaaggttcagtggcagtgggtctggaacagattattctctcaccattagcaacctggagcaagaagatattgccacttacttttgccaacagggtaatacgcttccgtggacgttcggtggaggcaccaagctggaaatcaaacgcggtccgggaggccccgagcccaaatcttctgacaaaactcacacatgcccaccgtgcccagcacctgaagcagcggggggaccgtcagtcttcctcttccccccaaaacccaaggacaccctcatgatctcccggacccctgaggtcacatgcgtggtggtggacgtgagccacgaagaccctgaggtcaagttcaactggtacgtggacggcgtggaggtgcataatgccaagacaaagccgcgggaggagcagtacaacagcacgtaccgtgtggtcagcgtcctcaccgtcctgcaccaggactggctgaatggcaaggagtacaagtgcaaggtgtccaacaaagccctcggagcccccatcgagaaaaccatctccaaagccaaagggcagccccgagaaccacaggtgtacaccctgcccccatcccgggatgagctgaccaagaaccaggtcagcctgacctgcctggtcaaaggcttctatcccagcgacatcgccgtggagtgggagagcaatgggcagccggagaacaactacaagaccacgcctcccgtgctggactccgacggctccttcttcctctatagcaagctcaccgtggacaagagcagatggcagcaggggaacgtcttctcatgctccgtgatgcatgaggctctgcacaaccactacacgcagaaaagtctctccctgtctccgggtggcggtggatcgggcggtggtggatctggaggaggtggctcgtccttagagctcacccagccaccttccgtaagcgtgtcaccaggacagaccgcatccatcacctgcagcgggagttctggcagctatggctggcaccagcagaaaccaggtcagagccctgtcacggttatctacagctcagataaaagacctagcgggataccggagaggttttccggctcatcctctgggagtactgcaacactgacaatatccggaactcaggccatggacgaggccgattactactgtggaggctacgacggaagcacagatgttgggatattcgggggaggaacaaaactcactgtgctcggtggcggaggaagcggtgggggcggaagcggggggggcggctcacaggtccagctcttagagtccggtggcgggctggtaaaaccgggcggctctctccgactctcctgtgccgcaagcggcttcgacttcattgactacgatatgttctggatcagacaggcgccaggcaaggggctcgagtgggtcggcgttataaacagatccggcagttacactaactatgctcctgctgtgaaaggacgcgctaccatctctagggataacgcaaaaaatagtatgtacctgcagatgaatagcctgcgtgccgaggacacagcagtgtactactgcgctagaggggcctgtacgcactgttgggatgccgactctgccggctacattgacgcctggggtcagggaacactggtcaccgtgagctct

SEQ ID NO: 2458 - protein, 240 aa, synthetic construct; identical to SEQ ID NO: 2426

SEQ ID NO: 2459 - DNA, 720 bp, synthetic construct; identical to SEQ ID NO: 2427
  source 1..720: mol_type = other DNA

SEQ ID NO: 2460 - protein, 250 aa, synthetic construct; identical to SEQ ID NO: 2356

SEQ ID NO: 2461 - DNA, 750 bp, synthetic construct; identical to SEQ ID NO: 2357
  source 1..750: mol_type = other DNA

SEQ ID NO: 2462 - protein, 246 aa, synthetic construct; identical to SEQ ID NO: 2438

SEQ ID NO: 2463 - DNA, 738 bp, synthetic construct; identical to SEQ ID NO: 2439
  source 1..738: mol_type = other DNA

SEQ ID NO: 2464 - protein, 732 aa, synthetic construct; identical to SEQ ID NO: 2424

SEQ ID NO: 2465 - DNA, 2196 bp, synthetic construct; identical to SEQ ID NO: 2425
  source 1..2196: mol_type = other DNA

SEQ ID NO: 2466 - protein, 240 aa, synthetic construct; identical to SEQ ID NO: 2426

SEQ ID NO: 2467 - DNA, 720 bp, synthetic construct; identical to SEQ ID NO: 2427
  source 1..720: mol_type = other DNA

SEQ ID NO: 2468 - protein, 250 aa, synthetic construct; identical to SEQ ID NO: 2356

SEQ ID NO: 2469 - DNA, 750 bp, synthetic construct; identical to SEQ ID NO: 2357
  source 1..750: mol_type = other DNA

SEQ ID NO: 2470 - protein, 242 aa, synthetic construct; identical to SEQ ID NO: 2358

SEQ ID NO: 2471 - DNA, 726 bp, synthetic construct; identical to SEQ ID NO: 2359
  source 1..726: mol_type = other DNA

SEQ ID NO: 2472 - protein, 740 aa, synthetic construct
EVRLQQSGAELVKPGASVRLSCTASGFNIKDYYMHWVKQRPEQGLEWIGWIDPENGNTIYDPKFQGKASMTADTSSNTAYLQLSSLTSEDTAVYYCARSGDYGYGYFDVWGAGTTVTVSSGGGGSGGGGSGGGGSDIVMSQPPSSLAVSVGEKVTMSCKSSQSLLYSSNQKNYLAWYQQKPGQSPKLLIYWASTRESGVPDRFTGSGSGTDFTLTISNVQSEDLAEYFCQQYYSYPYTFGGGTKLEIKGPGGPEPKSSDKTHTCPPCPAPEAAGGPSVFLFPPKPKDTLMISRTPEVTCVVVDVSHEDPEVKFNWYVDGVEVHNAKTKPREEQYNSTYRVVSVLTVLHQDWLNGKEYKCKVSNKALGAPIEKTISKAKGQPREPQVYTLPPSRDELTKNQVSLTCLVKGFYPSDIAVEWESNGQPENNYKTTPPVLDSDGSFFLYSKLTVDKSRWQQGNVFSCSVMHEALHNHYTQKSLSLSPGGGGSGGGGSGGGGSEVQLLESGGGLVQPGGSLRLSCAASGFTFSNYAMGWVRQAPGKGLEWVSVISSGGGGGTSYADSVKGRFTISRDNSKNTLYLQMNSLRAEDTAVYYCASPPRDYEGMDVWGQGTLVTVSSGGGGSGGGGSGGGGSDIQMTQSPSSLSASVGDRVTITCRASQQISTYLNWYQQKPGKAPKLLIYATSRLEDGVPSRFSGSGSGTDFTLTISSLQPEDFATYYCQQTYITPRTFGGGTKVEIK

SEQ ID NO: 2473 - DNA, 2220 bp, synthetic construct
  source 1..2220: mol_type = other DNA
gaggttcggctgcaacagtctggggcagagcttgtgaagccaggggcctcagtcaggttgtcstgcacagcttctggcttcaacattaaagactactatatgcactgggtgaagcagaggcctgaacagggcctggagtggattggatggattgatcctgagaatggtaatactatatatgacccgaagttccagggcaaggccagtatgacagcagacacttcctccaacacagcctacctgcagctcagcagcctgacatctgaagacactgccgtctattactgtgctaggtcgggggactacggctacggatacttcgatgtctggggcgcagggaccacggtcaccgtctcctcgggtggcggtggatcgggcggtggtggatctggaggaggtggctcggacattgtgatgtcacagcctccatcctccctagctgtgtcagttggagagaaggttactatgagctgcaagtccagtcagagccttttatatagtagcaatcaaaagaactacttggcctggtaccagcagaaaccagggcagtctcctaaactgctgatttactgggcatccactagggaatctggggtccctgatcgcttcacaggcagtggatctgggacagatttcactctcaccatcagcaatgtgcagtctgaagacttggcagagtatttctgtcagcaatattatagctatccgtacacgttcggaggggggaccaagctggaaataaaaggtccgggaggccccgagcccaaatcttctgacaaaactcacacatgcccaccgtgcccagcacctgaagcagcggggggaccgtcagtcttcctcttccccccaaaacccaaggacaccctcatgatctcccggacccctgaggtcacatgcgtggtggtggacgtgagccacgaagaccctgaggtcaagttcaactggtacgtggacggcgtggaggtgcataatgccaagacaaagccgcgggaggagcagtacaacagcacgtaccgtgtggtcagcgtcctcaccgtcctgcaccaggactggctgaatggcaaggagtacaagtgcaaggtgtccaacaaagccctcggagcccccatcgagaaaaccatctccaaagccaaagggcagccccgagaaccacaggtgtacaccctgcccccatcccgggatgagctgaccaagaaccaggtcagcctgacctgcctggtcaaaggcttctatcccagcgacatcgccgtggagtgggagagcaatgggcagccggagaacaactacaagaccacgcctcccgtgctggactccgacggctccttcttcctctatagcaagctcaccgtggacaagagcagatggcagcaggggaacgtcttctcatgctccgtgatgcatgaggctctgcacaaccactacacgcagaaaagtctctccctgtctccgggtggcggtggatcgggcggtggtggatctggaggaggtggctcggaggtgcagctcttagaaagcggaggtggcttggttcagcctggcggtagtctaagactgtcctgtgcagcttctggcttcacctttagcaactatgcgatgggttgggtccgtcaagcaccaggtaagggtctggaatgggtgtctgtcatctcttccggtggcggtggtggaacctcttatgccgatagcgtgaaaggacgcttcaccatcagcagggacaattccaagaacacgctgtacctgcaaatgaacagcctgcgagccgaggatacggccgtgtattactgtgcttcacctcctcgagactacgagggcatggatgtttggggccagggaaccctggtcaccgtctcctcaggtggcggtggatcaggaggtggaggatctggaggaggtggcagcgatattcagatgacccagagcccatcctccctgtcagcttctgtaggagaccgcgttaccatcacctgtcgtgccagccaacagatttccacttacctgaactggtatcagcagaagcctggtaaggcaccgaagctgctgatctatgccaccagccgtctggaagatggcgtcccgtcacgctttagtggctctggttctgggaccgacttcactctcaccattagcagtctgcaaccggaggacttcgcgacatactattgccagcagacatatatcaccccgcgcacctttggaggcggtaccaaggtggagatcaaa

SEQ ID NO: 2474 - protein, 248 aa, synthetic construct
EVRLQQSGAELVKPGASVRLSCTASGFNIKDYYMHWVKQRPEQGLEWIGWIDPENGNTIYDPKFQGKASMTADTSSNTAYLQLSSLTSEDTAVYYCARSGDYGYGYFDVWGAGTTVTVSSGGGGSGGGGSGGGGSDIVMSQPPSSLAVSVGEKVTMSCKSSQSLLYSSNQKNYLAWYQQKPGQSPKLLIYWASTRESGVPDRFTGSGSGTDFTLTISNVQSEDLAEYFCQQYYSYPYTFGGGTKLEIK

SEQ ID NO: 2475 - DNA, 744 bp, synthetic construct
  source 1..744: mol_type = other DNA
gaggttcggctgcaacagtctggggcagagcttgtgaagccaggggcctcagtcaggttgtcstgcacagcttctggcttcaacattaaagactactatatgcactgggtgaagcagaggcctgaacagggcctggagtggattggatggattgatcctgagaatggtaatactatatatgacccgaagttccagggcaaggccagtatgacagcagacacttcctccaacacagcctacctgcagctcagcagcctgacatctgaagacactgccgtctattactgtgctaggtcgggggactacggctacggatacttcgatgtctggggcgcagggaccacggtcaccgtctcctcgggtggcggtggatcgggcggtggtggatctggaggaggtggctcggacattgtgatgtcacagcctccatcctccctagctgtgtcagttggagagaaggttactatgagctgcaagtccagtcagagccttttatatagtagcaatcaaaagaactacttggcctggtaccagcagaaaccagggcagtctcctaaactgctgatttactgggcatccactagggaatctggggtccctgatcgcttcacaggcagtggatctgggacagatttcactctcaccatcagcaatgtgcagtctgaagacttggcagagtatttctgtcagcaatattatagctatccgtacacgttcggaggggggaccaagctggaaataaaa

SEQ ID NO: 2476 - protein, 250 aa, synthetic construct; identical to SEQ ID NO: 2356

SEQ ID NO: 2477 - DNA, 750 bp, synthetic construct; identical to SEQ ID NO: 2357
  source 1..750: mol_type = other DNA

SEQ ID NO: 2478 - protein, 242 aa, synthetic construct; identical to SEQ ID NO: 2358

SEQ ID NO: 2479 - DNA, 726 bp, synthetic construct; identical to SEQ ID NO: 2359
  source 1..726: mol_type = other DNA

SEQ ID NO: 2480 - protein, 500 aa, synthetic construct
EVQLLESGGGLVQPGGSLRLSCAASGFTFSNYAMGWVRQAPGKGLEWVSVISSGGGGGTSYADSVKGRFTISRDNSKNTLYLQMNSLRAEDTAVYYCASPPRDYEGMDVWGQGTLVTVSSGGGGSGGGGSGGGGSDIQMTQSPSSLSASVGDRVTITCRASQQISTYLNWYQQKPGKAPKLLIYATSRLEDGVPSRFSGSGSGTDFTLTISSLQPEDFATYYCQQTYITPRTFGGGTKVEIKGGGGSGGGGSEVRLQQSGAELVKPGASVRLSCTASGFNIKDYYMHWVKQRPEQGLEWIGWIDPENGNTIYDPKFQGKASMTADTSSNTAYLQLSSLTSEDTAVYYCARSGDYGYGYFDVWGAGTTVTVSSGGGGSGGGGSGGGGSDIVMSQPPSSLAVSVGEKVTMSCKSSQSLLYSSNQKNYLAWYQQKPGQSPKLLIYWASTRESGVPDRFTGSGSGTDFTLTISNVQSEDLAEYFCQQYYSYPYTFGGGTKLEIK

SEQ ID NO: 2481 - DNA, 1500 bp, synthetic construct
  source 1..1500: mol_type = other DNA
gaggtgcagctcttagaaagcggaggtggcttggttcagcctggcggtagtctaagactgtcctgtgcagcttctggcttcacctttagcaactatgcgatgggttgggtccgtcaagcaccaggtaagggtctggaatgggtgtctgtcatctcttccggtggcggtggtggaacctcttatgccgatagcgtgaaaggacgcttcaccatcagcagggacaattccaagaacacgctgtacctgcaaatgaacagcctgcgagccgaggatacggccgtgtattactgtgcttcacctcctcgagactacgagggcatggatgtttggggccagggaaccctggtcaccgtctcctcaggtggcggtggatcaggaggtggaggatctggaggaggtggcagcgatattcagatgacccagagcccatcctccctgtcagcttctgtaggagaccgcgttaccatcacctgtcgtgccagccaacagatttccacttacctgaactggtatcagcagaagcctggtaaggcaccgaagctgctgatctatgccaccagccgtctggaagatggcgtcccgtcacgctttagtggctctggttctgggaccgacttcactctcaccattagcagtctgcaaccggaggacttcgcgacatactattgccagcagacatatatcaccccgcgcacctttggaggcggtaccaaggtggagatcaaaggtggcggtggatcgggcggtggtggatctgaggttcggctgcaacagtctggggcagagcttgtgaagccaggggcctcagtcaggttgtcstgcacagcttctggcttcaacattaaagactactatatgcactgggtgaagcagaggcctgaacagggcctggagtggattggatggattgatcctgagaatggtaatactatatatgacccgaagttccagggcaaggccagtatgacagcagacacttcctccaacacagcctacctgcagctcagcagcctgacatctgaagacactgccgtctattactgtgctaggtcgggggactacggctacggatacttcgatgtctggggcgcagggaccacggtcaccgtctcctcgggtggcggtggatcgggcggtggtggatctggaggaggtggctcggacattgtgatgtcacagcctccatcctccctagctgtgtcagttggagagaaggttactatgagctgcaagtccagtcagagccttttatatagtagcaatcaaaagaactacttggcctggtaccagcagaaaccagggcagtctcctaaactgctgatttactgggcatccactagggaatctggggtccctgatcgcttcacaggcagtggatctgggacagatttcactctcaccatcagcaatgtgcagtctgaagacttggcagagtatttctgtcagcaatattatagctatccgtacacgttcggaggggggaccaagctggaaataaaa

SEQ ID NO: 2482 - protein, 248 aa, synthetic construct; identical to SEQ ID NO: 2474

SEQ ID NO: 2483 - DNA, 744 bp, synthetic construct; identical to SEQ ID NO: 2475
  source 1..744: mol_type = other DNA

SEQ ID NO: 2484 - protein, 10 aa, synthetic construct
GGGGSGGGGS

SEQ ID NO: 2485 - DNA, 30 bp, synthetic construct
  source 1..30: mol_type = other DNA
ggtggcggtggatcgggcggtggtggatct

SEQ ID NO: 2486 - protein, 242 aa, synthetic construct; identical to SEQ ID NO: 2358

SEQ ID NO: 2487 - DNA, 726 bp, synthetic construct; identical to SEQ ID NO: 2359
  source 1..726: mol_type = other DNA

SEQ ID NO: 2488 - protein, 248 aa, synthetic construct; identical to SEQ ID NO: 2474

SEQ ID NO: 2489 - DNA, 744 bp, synthetic construct; identical to SEQ ID NO: 2475
  source 1..744: mol_type = other DNA

SEQ ID NO: 2490 - protein, 248 aa, synthetic construct; identical to SEQ ID NO: 2474

SEQ ID NO: 2491 - DNA, 744 bp, synthetic construct; identical to SEQ ID NO: 2475
  source 1..744: mol_type = other DNA

SEQ ID NO: 2492 - protein, 246 aa, synthetic construct; identical to SEQ ID NO: 2434

SEQ ID NO: 2493 - DNA, 738 bp, synthetic construct; identical to SEQ ID NO: 2435
  source 1..738: mol_type = other DNA

SEQ ID NO: 2494 - protein, 246 aa, synthetic construct; identical to SEQ ID NO: 2434

SEQ ID NO: 2495 - DNA, 738 bp, synthetic construct; identical to SEQ ID NO: 2435
  source 1..738: mol_type = other DNA

SEQ ID NO: 2496 - protein, 240 aa, synthetic construct; identical to SEQ ID NO: 2426

SEQ ID NO: 2497 - DNA, 720 bp, synthetic construct; identical to SEQ ID NO: 2427
  source 1..720: mol_type = other DNA

SEQ ID NO: 2498 - protein, 240 aa, synthetic construct; identical to SEQ ID NO: 2426

SEQ ID NO: 2499 - DNA, 720 bp, synthetic construct; identical to SEQ ID NO: 2427
  source 1..720: mol_type = other DNA
